(19) United States
(12) Patent Application Publication
(10) Pub. No.: US 2017/0051056 A1
(43) Pub. Date: Feb. 23, 2017

(54) THERAPEUTIC DRUG FOR MALIGNANT TUMORS

(71) Applicant: NATIONAL INSTITUTE OF BIOMEDICAL INNOVATION, HEALTH AND NUTRITION, Osaka (JP)

(72) Inventors: Tetsuji NAKA, Osaka (JP); Satoshi SERADA, Osaka (JP); Minoru FUJIMOTO, Osaka (JP); Masayoshi TOYOURA, Kyoto (JP); Yuji SHOYA, Kyoto (JP)

(21) Appl. No.: 15/108,242

(22) PCT Filed: Dec. 25, 2014
(86) PCT No.: PCT/JP2014/006456

§ 371 Date: Jun. 24, 2016

(30) Foreign Application Priority Data
Dec. 27, 2013 (JP) 2013-272084

(51) Int. Cl. C07K 16/28; G01N 33/574; G01N 33/92; C07K 16/30

(52) U.S. Cl. CPC C07K 16/28; C07K 16/3069; C07K 16/303; C07K 16/3023; C07K 16/3046; G01N 33/57492; G01N 33/92; C07K 2317/565; C07K 2317/622; C07K 2317/33; C07K 2317/92; G01N 2333/705

(57) ABSTRACT

The present invention makes it possible to obtain a novel therapeutic drug for malignant tumors. Specifically, the present invention provides a therapeutic drug for malignant tumors, said drug including an anti-LSR (lipolysis stimulated lipoprotein receptor) antibody or an antigen-binding fragment thereof, or a functional equivalent thereof, or an LSR inhibitor such as a nucleic acid. Said inhibitor uses a therapeutic drug for malignant tumors, said drug including an anti-LSR antibody, or an antigen-binding fragment thereof or a functional equivalent thereof. The inhibitor may also be an LSR antagonist. The abovementioned therapeutic drug may be administered to patients in whom the onset of an LSR-positive malignant tumor is judged to have occurred.

### TECHNICAL FIELD

[0001] The present invention relates to a therapeutic drug, diagnostic drug or the like for malignant tumor.

### BACKGROUND ART

[0002] LSR (lipolysis stimulated lipoprotein receptor) is known as a molecule associated with metabolism of low-density lipoprotein (LDL). Several LSR related research results have been reported. For example, Non Patent Literature 1 describes that LSR expression is reduced in a liver of obese and type 2 diabetes mouse models. Further, Non Patent Literature 2 describes that LSRs are expressed in bladder cancer. Non Patent Literature 3 describes that LSRs are expressed in colon cancer cells. Non Patent Literature 4 describes that LSRs are expressed in breast cancer cells. Patent Literature 1 describes that LSRs are expressed in ovarian cancer cells or the like.

### CITATION LIST

### Patent Literature

[0003] [PTL 1] WO 2012/140627

### Non Patent Literature

[0004] [NPL 1] “Liver-specific loss of lipolysis-stimulated lipoprotein receptor triggers systemic hyperlipidemia in mice.” Narvekar et al., Diabetes. 2009 May; 58(5): 1040-9
[0005] [NPL 2] “Increased cell motility and invasion upon knockdown of lipolysis stimulated lipoprotein receptor (LSR) in SW780 bladder cancer cells.” Herbsleb et al., BMC Med Genomics. 2008 Jul. 22; 1:31.
[0006] [NPL 3] “Prognostic value of LISCH7 mRNA in plasma and tumor of colon cancer patients.” Garcia et al., Clin Cancer Res. 2007 Nov. 1; 13(21): 6351-8.
[0007] [NPL 4] “Functional heterogeneity within the CD44 high human breast cancer cell-like stem compartment reveals a gene signature predictive of distant metastasis.” Leth-Larsen et al., Mol Med. 2012 Sep. 25; 18: 1109-21.

### SUMMARY OF INVENTION

### Solution to Problem

[0008] The disease mechanism of malignant tumor is complex, with many parts unclear. Thus, many medical needs remain unfulfilled in the field. The inventors have discovered that growth of malignant tumor cells is suppressed when the malignant tumor cells are contacted with an anti-LSR antibody as a number of researches are conducted on malignant tumor. Furthermore, when an LSR siRNA was transfected into malignant tumor cells, growth of malignant tumor cells was also suppressed in this case. In addition, when an anti-LSR antibody was actually administered to a malignant tumor model mouse, a notable decrease in tumor volume was observed. In view of the above, it was elucidated that an LSR suppressant such as an anti-LSR antibody is effective in treating malignant tumor. In this regard, the present invention provides a novel therapeutic agent for malignant tumor targeting LSRs and the like.

[0009] Further, the inventors elucidated, as described in the Examples disclosed below, the presence of many LSR negative patients while there are LSR positive patients among malignant tumor patients. In view of the above, it was elucidated that diagnosis of the presence or absence of LSR positive state in a malignant tumor patient prior to therapy is importantin the treatment of malignant tumor targeting LSRs.

[0010] The Examples of the above-described Patent Literature 1 suggest that an LSR mRNA was detected in a few types of cancer. The claims have an actual recitation of an anti-LSR antibody inducing apoptosis of cancer cells. However, Patent Literature 1 does not have any pharmacological data from an actual successful cancer therapy. In addition, Patent Literature 1 does not describe that the presence or absence of an LSR positive condition in a malignant tumor patient is diagnosed prior to therapy. For this reason, an anti-LSR antibody could not be considered effective for treating malignant tumor only from the results of Patent Literature 1.

[0011] In one aspect, the present invention provides a therapeutic or prophylactic drug for malignant tumor, comprising a suppressant of an LSR (lipolysis stimulated lipoprotein receptor).

[0012] In one embodiment, the suppressantin the present invention can comprise an anti-LSR (lipolysis stimulated lipoprotein receptor) antibody, an antigen binding fragment or a functional equivalent thereof, or a nucleic acid.

[0013] In another embodiment, the suppressantin the present invention can comprise an anti-LSR (lipolysis stimulated lipoprotein receptor) antibody or an antigen binding fragment or a functional equivalent thereof.

[0014] Instill another embodiment, the suppressantin the present invention can be an RNAi molecule directed to an LSR or a polynucleotide encoding the RNAi molecule.

[0015] In still another embodiment, the malignant tumor in the present invention can be LSR positive malignant tumor.

[0016] In still another embodiment, the present invention can be for administration to a patient determined to have an episode of LSR positive malignant tumor.

[0017] In still another embodiment, the present invention can be for administration to a patient among malignant tumor patients whose malignant tumor has been determined to be LSR positive malignant tumor.

[0018] In still another embodiment, the anti-LSR antibody in the present invention can be an anti-LSR antibody that specifically binds to an epitope of an LSR. More specifically, the antibody may have positions 116-134 and/or 216-230 of SEQ ID NO: 7 as the epitope.

[0019] In still another embodiment, the anti-LSR antibody in the present invention can be an antibody having an ability to inhibit exacerbation due to a VLDL.

[0020] In still another embodiment, the anti-LSR antibody in the present invention may be one or more antibodies selected from the group consisting of: (a) an antibody with heavy chain CDRs 1, 2, and 3 and light chain CDRs 1, 2, and 3 comprising amino acid sequences set forth in positions 31-35, 50-66, 99-104, 153-165, 182-188 and 221-230 of SEQ ID NO: 1, respectively; (b) an antibody with heavy chain CDRs 1, 2, and 3 and light chain CDRs 1, 2, and 3 comprising amino acid sequences set forth in positions 31-35, 50-66, 99-103, 152-165, 182-188 and 221-230 of SEQ ID NO: 2, respectively; (c) an antibody with heavy chain CDRs 1, 2, and 3 and light chain CDRs 1, 2, and 3 comprising amino acid sequences set forth in positions 31-35, 50-66, 99-104, 153-165, 182-188 and 221-229 of SEQ ID NO: 3, respectively; (d) an antibody with heavy chain CDRs 1, 2, and 3 and light chain CDRs 1, 2, and 3 comprising amino acid sequences set forth in positions 31-35, 50-66, 99-104, 153-165, 182-188 and 221-229 of SEQ ID NO: 4, respectively; (e) an antibody with heavy chain CDRs 1, 2, and 3 and light chain CDRs 1, 2, and 3 comprising amino acid sequences set forth in positions 31-35, 50-66, 99-104, 153-165, 182-188 and 221-229 of SEQ ID NO: 5, respectively; and (f) an antibody with heavy chain CDRs 1, 2, and 3 and light chain CDRs 1, 2, and 3 comprising amino acid sequences set forth in positions 31-35, 50-66, 99-104, 153-165, 182-188 and 221-229 of SEQ ID NO: 6, respectively, or a mutant of the antibody, which is free of a mutation in the CDRs but comprises one or several substitutions, additions, or deletions in a framework of the antibody in the mutant.

[0021] In still another embodiment, the anti-LSR antibody in the present invention can be a monoclonal antibody.

[0022] In still another embodiment, an antibody class of the anti-LSR antibody in the present invention may be IgG.

[0023] In still another embodiment, the anti-LSR antibody in the present invention may be an antigen binding fragment.

[0024] In another aspect, the present invention provides an agent for suppressing cell division of a malignant tumor cell, comprising an anti-LSR antibody.

[0025] In another aspect, the present invention provides a companion diagnostic drug for malignant tumor therapy targeting an LSR, comprising an LSR detection agent.

[0026] In one embodiment, the LSR detection agent in the present invention can comprise an anti-LSR antibody. In another aspect, the present invention provides a companion diagnostic method for malignant tumor therapy targeting an LSR, comprising inspecting whether a malignant tumor sample of a malignant tumor patient is LSR positive. In another aspect, the present invention provides an antibody or antibodies selected from the group consisting of: (a) an antibody with heavy chain CDRs 1, 2, and 3 and light chain CDRs 1, 2, and 3 comprising amino acid sequences set forth in positions 31-35, 50-66, 99-104, 153-165, 182-188 and 221-230 of SEQ ID NO: 1, respectively; (b) an antibody with heavy chain CDRs 1, 2, and 3 and light chain CDRs 1, 2, and 3 comprising amino acid sequences set forth in positions 31-35, 50-66, 99-103, 152-165, 182-188 and 221-230 of SEQ ID NO: 2, respectively; (c) an antibody with heavy chain CDRs 1, 2, and 3 and light chain CDRs 1, 2, and 3 comprising amino acid sequences set forth in positions 31-35, 50-66, 99-104, 153-165, 182-188 and 221-229 of SEQ ID NO: 3, respectively; (d) an antibody with heavy chain CDRs 1, 2, and 3 and light chain CDRs 1, 2, and 3 comprising amino acid sequences set forth in positions 31-35, 50-66, 99-104, 153-165, 182-188 and 221-229 of SEQ ID NO: 4, respectively; (e) an antibody with heavy chain CDRs 1, 2, and 3 and light chain CDRs 1, 2, and 3 comprising amino acid sequences set forth in positions 31-35, 50-66, 99-104, 153-165, 182-188 and 221-229 of SEQ ID NO: 5, respectively; and (f) an antibody with heavy chain CDRs 1, 2, and 3 and light chain CDRs 1, 2, and 3 comprising amino acid sequences set forth in positions 31-35, 50-66, 99-104, 153-165, 182-188 and 221-229 of SEQ ID NO: 6, respectively, or a mutant of the antibody, which is free of a mutation in the CDRs but comprises one or several substitutions, additions, or deletions in a framework of the antibody in the mutant. These antibodies may be an antibody selected from a monoclonal antibody, polyclonal antibody, chimeric antibody, humanized antibody, human antibody, multifunctional antibody, bispecific or oligospecific antibody, single chain antibody, scFV, diabody, sc (Fv)₂ (single chain (Fv)₂), and scFv-Fc.

[0027] In another aspect, the present invention provides a composition for preventing or treating malignant tumor, comprising an LSR binding agent. In one embodiment, the malignant tumor in the present invention can be LSR positive malignant tumor.

[0028] In another embodiment, the present invention can further comprise a cell-killing agent.

[0029] In another embodiment, the LSR binding agent in the present invention may be an antibody, a fragment or a functional equivalent thereof, or a nucleic acid. In a specific embodiment, the LSR binding agent in the present invention may be an antibody or a fragment or a functional equivalent thereof, further bound to a cell killing agent. In a specific embodiment, the malignant tumor in the present invention may comprise ovarian cancer. The ovarian cancer in the present invention may be recurrent ovarian cancer. Alternatively, the malignant tumor may be metastasized ovarian cancer. The malignant tumor can comprise ovarian cancer, pancreatic cancer, lung cancer, gastric cancer, or colon cancer. Alternatively, the malignant tumor may be early-stage ovarian cancer. In another embodiment, ovarian cancer can be ovarian serous adenocarcinoma or ovarian clear cell adenocarcinoma. In a specific embodiment, the LSR binding agent in the present invention may be characterized by having an antibody or a fragment or a functional equivalent thereof, the antibody being one or more antibodies selected from the group consisting of: (a) an antibody with heavy chain CDRs 1, 2, and 3 and light chain CDRs 1, 2, and 3 comprising amino acid sequences set forth in positions 31-35, 50-66, 99-104, 153-165, 182-188 and 221-230 of SEQ ID NO: 1, respectively; (b) an antibody with heavy chain CDRs 1, 2, and 3 and light chain CDRs 1, 2, and 3 comprising amino acid sequences set forth in positions 31-35, 50-66, 99-103, 152-165, 182-188 and 221-230 of SEQ ID NO: 2, respectively; (c) an antibody with heavy chain CDRs 1, 2, and 3 and light chain CDRs 1, 2, and 3 comprising amino acid sequences set forth in positions 31-35, 50-66, 99-104, 153-165, 182-188 and 221-229 of SEQ ID NO: 3, respectively; (d) an antibody with heavy chain CDRs 1, 2, and 3 and light chain CDRs 1, 2, and 3 comprising amino acid sequences set forth in positions 31-35, 50-66, 99-104, 153-165, 182-188 and 221-229 of SEQ ID NO: 4, respectively; (e) an antibody with heavy chain CDRs 1, 2, and 3 and light chain CDRs 1, 2, and 3 comprising amino acid sequences set forth in positions 31-35, 50-66, 99-104, 153-165, 182-188 and 221-229 of SEQ ID NO: 5, respectively; and (f) an antibody with heavy chain CDRs 1, 2, and 3 and light chain CDRs 1, 2, and 3 comprising amino acid sequences set forth in positions 31-35, 50-66, 99-104, 153-165, 182-188 and 221-229 of SEQ ID NO: 6, respectively, or a mutant of the antibody, which is free of a mutation in the CDRs but comprises one or several substitutions, additions, or deletions in a framework of the antibody in the mutant.

[0030] In still another embodiment, the anti-LSR antibody is an antibody selected from a monoclonal antibody, polyclonal antibody, chimeric antibody, humanized antibody, human antibody, multifunctional antibody, bispecific or oligospecific antibody, single chain antibody, scFV, diabody, sc (Fv)₂ (single chain (Fv)₂), and scFv-Fc.

[0031] That is, according to another aspect of the present invention, a therapeutic drug for malignant tumor comprising an anti-LSR antibody is provided.

[0032] Further, according to another aspect of the present invention, a therapeutic drug for malignant tumor, comprising an LSR antagonist is provided.

[0033] Further, according to another aspect of the present invention, an agent for suppressing cell division of a malignant tumor cell, comprising an anti-LSR antibody is provided.

[0034] Further, according to another aspect of the present invention, a companion diagnostic drug for malignant tumor therapy targeting an LSR, comprising an anti-LSR antibody is provided. One embodiment is characterized in that the malignant tumor is determined to be LSR positive by the companion diagnostic method of present invention, and the LSR binding agent is administered thereafter.

[0035] Further, according to another aspect of the present invention, a companion diagnostic method for malignant tumor therapy targeting an LSR, comprising inspecting whether a malignant tumor sample of a malignant tumor patient is LSR positive, is provided.

[0036] In a specific embodiment, the malignant tumor may be LSR positive malignant tumor. Further, in one embodiment of the present invention, the above-described therapeutic drug may be a therapeutic drug for administration to a patient determined to have an episode of LSR positive malignant tumor. Further, in one embodiment of the present invention, the above-described therapeutic drug may be a therapeutic drug for administration to a patient among tumor patients whose malignant tumor has been determined to be LSR positive malignant tumor. Further, in one embodiment of the present invention, the anti-LSR antibody may be an anti-LSR antibody that specifically binds to an epitope of an LSR. Further, in one embodiment of the present invention, the anti-LSR antibody may be one or more antibodies selected from the group consisting of: (a) an antibody with heavy chain CDRs 1, 2, and 3 and light chain CDRs 1, 2, and 3 comprising amino acid sequences set forth in positions 31-35, 50-66, 99-104, 153-165, 182-188 and 221-230 of SEQ ID NO: 1, respectively; (b) an antibody with heavy chain CDRs 1, 2, and 3 and light chain CDRs 1, 2, and 3 comprising amino acid sequences set forth in positions 31-35, 50-66, 99-103, 152-165, 182-188 and 221-230 of SEQ ID NO: 2, respectively; (c) an antibody with heavy chain CDRs 1, 2, and 3 and light chain CDRs 1, 2, and 3 comprising amino acid sequences set forth in positions 31-35, 50-66, 99-104, 153-165, 182-188 and 221-229 of SEQ ID NO: 3, respectively; (d) an antibody with heavy chain CDRs 1, 2, and 3 and light chain CDRs 1, 2, and 3 comprising amino acid sequences set forth in positions 31-35, 50-66, 99-104, 153-165, 182-188 and 221-229 of SEQ ID NO: 4, respectively; (e) an antibody with heavy chain CDRs 1, 2, and 3 and light chain CDRs 1, 2, and 3 comprising amino acid sequences set forth in positions 31-35, 50-66, 99-104, 153-165, 182-188 and 221-229 of SEQ ID NO: 5, respectively; and (f) an antibody with heavy chain CDRs 1, 2, and 3 and light chain CDRs 1, 2, and 3 comprising amino acid sequences set forth in positions 31-35, 50-66, 99-104, 153-165, 182-188 and 221-229 of SEQ ID NO: 6, respectively, or a mutant of the antibody, which is free of a mutation in the CDRs but comprises one or several substitutions, additions, or deletions in a framework of the antibody in the mutant. These antibodies may be an antibody selected from a monoclonal antibody, polyclonal antibody, chimeric antibody, humanized antibody, human antibody, multifunctional antibody, bispecific or oligospecific antibody, single chain antibody, scFV, diabody, sc(Fv)₂ (single chain (Fv)₂), and scFv-Fc. The antibodies used are not limited, but an antibody having positions 116-134 and/or 216-230 of SEQ ID NO: 7 as an epitope can be advantageously used. This is because an advantageous effect as well as safety and stability thereof are demonstrated herein.

[0037] Further, in a specific embodiment of the present invention, the above-described anti-LSR antibody may be a monoclonal antibody. Further, in one embodiment of the present invention, an antibody class of the above-described anti-LSR antibody may be IgG. Further, in one embodiment of the present invention, the above-described anti-LSR antibody may be the antigen binding fragment. Further, in one embodiment of the present invention, the above-described LSR antagonist may be an RNAi molecule directed to an LSR or a polynucleotide encoding the RNAi molecule.

[0038] In another aspect of the present invention, the present invention provides a poor prognosis marker for malignant tumor therapy, comprising an LSR (lipolysis stimulated lipoprotein receptor) binding agent. It is understood that a binding agent in any form of the present invention explained herein can be used as the binding agent used in this aspect. For example, the binding agent may be an antibody, a fragment or a functional equivalent thereof, or a nucleic acid, which may be labeled.

[0039] In another aspect of the present invention, the present invention provides a method of using an expression level of an LSR (lipolysis stimulated lipoprotein receptor) as an indicator for poor prognosis of malignant tumor therapy. It is understood that a binding agent in any form of the present invention explained herein can be used as the binding agent used in this aspect. For example, the binding agent may be an antibody, a fragment or a functional equivalent thereof, or a nucleic acid, which may be labeled.

[0040] In another aspect of the present invention, the present invention provides a diagnostic agent for poor prognosis of malignant tumor therapy, comprising an LSR (lipolysis stimulated lipoprotein receptor) binding agent. It is understood that a binding agent in any form of the present invention explained herein can be used as the binding agent used in this aspect. For example, the binding agent may be an antibody, a fragment or a functional equivalent thereof, or a nucleic acid, which may be labeled.

[0041] In still another aspect, the present invention provides a therapeutic method, prophylactic method, use and the like using a pharmaceutical composition, therapeutic agent or prophylactic agent of the present invention.

[0042] It is understood that one or more of the aforementioned features can be further combined for use.

[0043] Those skilled in the art who have read and understood the following Detailed Description as needed would recognize further embodiments and advantages of the present invention.

### Advantageous Effects of Invention

[0044] According to the present invention, a novel therapeutic drug, diagnostic drug or the like for malignant tumor is obtained.

### BRIEF DESCRIPTION OF DRAWINGS

[0045] FIG. 1 is a diagram showing results of RT-PCR performed on nucleic acids obtained from ovarian serous adenocarcinoma cell strains. One on the left show normal cells (HOSE2 on the left side). Three on the right show cancer cells (from the left: OVCAR3, OVSAHO, and JHOS4). The top row shows LSRs and the bottom row shows the background β actin.

[0046] FIG. 2 is a diagram showing results of RT-PCR performed on nucleic acids obtained from ovarian clear cell adenocarcinoma cell strains. One on the left show normal cells (HOSE2C on the left side). Four on the right show cancer cells (from the left: OVTOKO, OVMANA, OVISE, and RMG-1). The top row shows LSRs and the bottom row shows the background β actin.

[0047] FIG. 3 is a diagram showing results of RT-PCR performed on nucleic acids obtained from endometrial cancer cell strains. The left end shows normal cells (E6/E7/TERT), and the others are cancer cells (from the left: HEC1, HEC1A, HEC6, HEC88nu, HEC108, HEC116, HEC251, and SMG-M). The top row shows LSRs and the bottom row shows the background β actin.

[0048] FIG. 4 is a diagram showing results of Western blot performed on proteins obtained from ovarian serous adenocarcinoma cell strains. One on the left show normal cells (HOSE2C on the left side). Three on the right show cancer cells (from the left: OVCAR3, OVSAHO, and JHOS4).

[0049] FIG. 5 is a diagram showing results of Western blot performed on proteins obtained from ovarian clear cell adenocarcinoma cell strains. One on the left show normal cells (HOSE2C on the left side). Four on the right show cancer cells (from the left: OVTOKO, OVMANA, OVISE, and RMG-1).

[0050] FIG. 6 is a diagram showing results of Western blot performed on proteins obtained from endometrial cancer cell strains. The top left end shows normal cells (E6/E7/TERT), and others are cancer cells. The top row shows, from the left, HEC1, HEC1A, HEC6, and HEC88nu. The bottom row shows from the left, HEC108, HEC116, HEC251, and SMG-M. All of them represent LSRs.

[0051] FIG. 7 is a diagram showing results of Western blot performed on proteins obtained from tissue on which surgery has been performed for ovarian serous adenocarcinoma and tissue on which surgery has been performed for ovarian clear cell adenocarcinoma. The Figure shows, from the left, two samples from normal (healthy individual's) ovaries (No. 1 and No. 2=represented by (1) and (2)), two samples from clear cell adenocarcinoma patients (No. 1 and No. 2=represented by (3) and (4)), and two samples from serous adenocarcinoma patients (No. 1 and No. 2=represented by (5) and (6)).

[0052] FIG. 8 is a diagram showing results of Western Blot performed on proteins obtained from tissue on which surgery has been performed for endometrial cancer. The Figure shows, from the left, two samples from normal (healthy individual's) ovaries (No. 1 and No. 2=represented by (1) and (2)), and two samples from endometrial cancer patients (No. 1 and No. 2=represented by (3) and (4)).

[0053] FIG. 9 is a diagram showing the amino acid sequence of the anti-LSR antibody described in the Examples.

[0054] FIG. 10 is a diagram showing results of assessing reactivity of #9-7 antibody to, from the left, OVSAHO, JHSO4, RMG-I, and OVISE. The vertical axis indicates intensity and the horizontal axis indicates cell frequency.

[0055] FIG. 11 is a diagram showing results of assessing reactivity of #16-6 antibody to, from the left, OVSAHO, JHSO4, RMG-I, and OVISE. The vertical axis indicates intensity and the horizontal axis indicates cell frequency.

[0056] FIG. 12 is a diagram showing results of assessing reactivity of #26-2 antibody to, from the left, OVSAHO, JHSO4, RMG-I, and OVISE. The vertical axis indicates intensity and the horizontal axis indicates cell frequency.

[0057] FIG. 13 is a diagram showing results of assessing reactivity of #27-6 antibody to, from the left, OVSAHO, JHSO4, RMG-I, and OVISE. The vertical axis indicates intensity and the horizontal axis indicates cell frequency.

[0058] FIG. 14 is a diagram showing results of assessing reactivity of #1-25 antibody to, from the left, OVSAHO, JHSO4, RMG-I, and OVISE. The vertical axis indicates intensity and the horizontal axis indicates cell frequency.

[0059] FIG. 15 is a diagram showing a result of analyzing ovarian serous adenocarcinoma tissue for expression of LSRs by an immunohistochemical staining method using monoclonal the antibody #1-25. The top row shows serous G2 of ovary, serous G3 of tube, serous G3 of ovary and serous G3 of ovary. All pictures in the bottom row show a clear cell of ovary.

[0060] FIG. 16 is a diagram showing a result of analyzing ovarian serous adenocarcinoma tissue for expression of LSRs by an immunohistochemical staining method using monoclonal antibodies #1-25. The top row shows stage IIIc of serous G2 of ovary, stage Ic of serous G3 of tube, stage IIb of serous G3 of ovary, and stage IIIb of serous G3 of ovary. The bottom row shows, from the left, stage IIIc of clear cell of ovary, stage IIc of clear cell of ovary, and stage IV of clear cell of ovary.

[0061] FIG. 17 is a diagram showing a result of analyzing endometrial cancer tissue for expression of LSRs by an immunohistochemical staining method using monoclonal antibodies #9-7 (4.5 μg/ml). The left side is endometrial cancer #1 applied with Toyobo Can get signal immunostain solution A as the primary antibody diluent, and the right is endometrial cancer #1 applied with Toyobo Can get signal immunostain solution B as the primary antibody diluent.

[0062] FIG. 18 is a diagram showing results of assessing #9-7 antibody for the effect of suppressing growth of RMG-I. The vertical axis indicates relative growth compared with no treatment. The horizontal axis is the dosage of IgG.

[0063] FIG. 19 is a diagram showing results of assessing #1-25 antibody for the effect of suppressing growth of RMG-I. The vertical axis indicates relative growth compared with no treatment. The horizontal axis is the dosage of IgG.

[0064] FIG. 20 is a diagram showing results of assessing #1-25 antibody (the left three; from the left, 1 μg/ml, 10 μg/ml, and 100 μg/ml, respectively) and #26-2 antibody (middle three; from the left, 1 μg/ml, 10 μg/ml, and 100 μg/ml, respectively) for the effect of suppressing growth of A2780. The control IgG is shown on the right (right three; from the left, 1 μg/ml, 10 μg/ml, and 100 μg/ml, respectively). Each antibody has an effect, but #1-25 exhibited a stronger effect than #26-2.

[0065] FIG. 21 is a diagram showing results of assessing the LSR siRNA described in the Examples for the effect of suppressing growth of OVSAHO. From the left, day 1, day 2, day 3, day 4, and day 5 are shown. 4 bars for each day indicate, from the left, mean amount with no treatment, mean value of control, mean value of LSR siRNA 1, and mean value of LSR siRNA2.

[0066] FIG. 22 is a diagram of a result showing that lipid (cholesterol) incorporation is elevated in the cells stably expressing LSRs described in the Examples. The left shows the effects on total cholesterol, the middle graph shows the effects on triglyceride, and the right shows the effects on phospholipid. The vertical axis indicates each incorporation (mg/ml). The horizontal axis indicates each of EMP1 low density, EMP1 high density, L45 low density, and L45 high density. EMP indicates empty vector introduced cells and L indicates cells forced to express LSRs.

[0067] FIG. 23 is a diagram of a result showing that lipid (cholesterol) incorporation is elevated in high density culture in the cells stably expressing LSRs described in the Examples. The vertical axis indicates total cholesterol incorporation (mg/ml). EMP1 indicates empty vector introduced cells and L45 indicates cells forced to express LSRs.

[0068] FIG. 24 is a diagram of a result showing that LSR expression described in the Examples elevates VLDL metabolism, but elevation in metabolism due to VLDL is inhibited by LSR antibody administration. Significantinhibition of elevation in metabolism due to VLDL is exhibited for #9-7. Slight inhibition is also observed for the #1-25 antibody. In each graph, the vertical axis is OCR (pMoles/min) % and the horizontal axis indicates the elapsed time (minutes). Squares indicate PBS (background control), triangles indicate the control IgG, and rhombuses indicate anti-LSR antibodies. The top panel is for empty vector (E1) and the bottom is for cells forced to express LSRs (L45).

[0069] FIG. 25 is a diagram showing the condition when the anti-LSR antibody described in the Examples was administered to a malignant tumor model mouse.

[0070] FIG. 26 is a diagram showing results of assessing the anti-LSR antibody described in the Examples for the antitumor effect after administration of #9-7 or #1-25 to a malignant tumor model mouse. The vertical axis indicates tumor volume (mm³). The horizontal axis indicates the number of elapsed days. Squares indicate the control IgG, triangles indicate anti-LSR antibody (#9-7), and rhombuses indicate anti-LSR antibody (#1-25).

[0071] FIG. 27 is a diagram showing results of assessing the anti-LSR antibody described in the Examples for the antitumor effect after administration of #9-7 or #1-25 to a malignant tumor model mouse. The vertical axis indicates tumor weight (mg). From the left, control IgG administered group (n=8), anti-LSR antibody (#9-7) administered group (n=6), and anti-LSR antibody (#1-25) administered group (n=6) are shown.

[0072] FIG. 28 is a diagram showing results of assessing the anti-LSR antibody described in the Examples for the antitumor effect after administration of #9-7 or #1-25 to a malignant tumor model mouse. From the left, control IgG administered group (n=8), anti-LSR antibody (#9-7) administered group (n=6), and anti-LSR antibody (#1-25) administered group (n=6) are shown.

[0073] FIG. 29 shows that recurrent ovarian cancer does not have an effective therapeutic method. Conventionally, there was no effective therapeutic method for recurrent ovarian cancer. The epidemiological characteristic of ovarian cancer is that ovarian cancer readily infiltrate into the surrounding by the lymph node and peritoneal metastasis or the like and advances quickly. For instance, 40% or more of ovarian cancer in Japanese patients is considered serous, 24% clear cells, 17% endometrioid, and 13% mucinous adenocarcinoma. As a 1st line of defense, cisplatin or taxol is used, and Avastin is used for recurrent ovarian cancer. However, it was considered that improvement in survival rate was not observed. Since a therapeutic method during the progression stage or recurrence is non-existent, ovarian cancer was considered as tumor with poor prognosis. Thus, development of a novel therapeutic method is considered imperative. The Table on the left shows antibody medicaments approved as a cancer therapeutic drug (Carter P J Nat. Rev. Immunol. 006, May 6(5) 343-357, Review). The graph on the right side of FIG. 29 shows the 5 year survival rate (31% in Stage IV) (Japanese Society of Obstetrics and Gynecology, Fujinka Shuyo Iinkai Hokoku [Gynecology tumor committee report], 2012, Vol. 64, No. 6).

[0074] FIG. 30 is an immunostaining diagram showing that LSRs are expressed in ovarian cancer tissue. The left shows ovarian serous adenocarcinoma and the right shows ovarian clear cell adenocarcinoma. The bottom panel shows Western blot of each cell. The left three columns show normal ovary, columns 4-5 from the left show clear cell adenocarcinoma, and column 6 from the left to the right end show serous adenocarcinoma. LSR indicates the band of LSRs, and GAPDH indicates the control.

[0075] FIG. 31 is a diagram showing that LSRs are also expressed in ovarian cancer metastasized sites. The left column shows lymph node metastasis and the right column shows greater omentum metastasis. The top panel shows 100 times magnification and the bottom panel shows 400 times magnification.

[0076] FIG. 32 is a diagram showing that LSRs are also expressed in ovarian cancer metastasized sites. The left column shows lymph node metastasis and the right column shows greater omentum metastasis. The top panel shows 100 times magnification and the bottom panel shows 400 times magnification.

[0077] FIG. 33 is a diagram showing that LSRs are expressed in ovary cancer from an early stage. The top left shows hematoxyl in and eosin stain (HE) staining. Top middle shows #1-25A, top right shows #1-45A, bottom left shows #9-7B, bottom middle shows #1-25B, and bottom right shows #1-45B. The cells shown are ovarian clear cells in Stage Ic/IIc.

[0078] FIG. 34 shows that LSRs are also specifically expressed in gastric cancer. The results of examination by immunostaining are shown, which are results of immunostaining. The top row shows, from the left column, 40 and 400 times magnification of ovarian clear cell cancer and 40 and 400 times magnification of MK2 cells. The bottom row shows pictures of 40 and 400 times magnificent of MK1 and 40 and 400 times magnification of MK3.

[0079] FIG. 35 is a diagram showing that LSRs are strongly expressed in gastric cancer (signet ring cell cancer). The top left panel shows a picture magnified 5 times, top right shows a picture magnified 10 times, bottom left shows a picture magnified 20 times, and bottom right shows a picture magnified 40 times.

[0080] FIG. 36 is a diagram showing analysis of LSR expression by IHC using a normal frozen tissue array. The top row shows, from the left, adrenal gland, bone marrow, breast, brain (cerebellum), and brain (cerebral cortex). The middle row shows, from the left, brain (pituitary gland), colon, endothelium (aorta), endothelium (aorta, thoracic), and endothelium (artery). The bottom row shows, from the left, esophagus, fallopian tube, heart (right ventricle), kidney, and liver.

[0081] FIG. 37A is a diagram showing analysis of LSR expression by IHC using a normal frozen tissue array. The top row shows, from the left, lung, lymph node, ovary, pancreas, and placenta. The second row from the top shows, from the left, prostate, skin, spinal cord, spleen, and striated muscle. The second row from the bottom shows, from the left, stomach, testis, thymus, thyroid, and ureter. The bottom row shows, from the left, endometrium and cervix.

[0082] FIG. 37B shows results of calculating the dissociation constant (K_{D}) of anti-LSR antibodies by FACS. RMG-I cells were stained with antibodies of various concentrations and analyzed by FACS. As shown, #9-7 had K_{D}=2.52 nM, #1-25 had K_{D}=2.03 nM, #16-6 had K_{D}=2.33 nM, #26-2 had K_{D}=4.04 nM, #27-6 had K_{D}=4.29 nM, and #1-43 had K_{D}=24.62 nM.

[0083] FIG. 38 shows results of investigating prognosis of ovarian serous adenocarcinoma patients or ovarian clear cell adenocarcinoma based on whether the LSR expression is high or low. 21 cases of patients with strong expression of LSRs and 12 cases of patients with weak expression were studied for ovarian serous adenocarcinoma, and 27 cases of patients with strong expression of LSRs and 24 cases of patients with weak expression were studied for ovarian clear cell adenocarcinoma. It can be seen that ovarian serous adenocarcinoma with high level of expression has poorer prognosis compared to the group with low level of expression.

[0084] FIG. 39 shows a comparison of the epitope region of hLSR antibody of the antibody of the present invention with the amino acid sequence of hLSR and mLSR.

[0085] FIG. 40 shows that an anti-hLSR antibody cross-reacts with mLSR. The original diagram is shown in red and blue, where red indicates mIgG2a. Blue indicates the staining pattern in clones of various anti-LSR antibodies. Blue is marked with an arrow in this diagram. The reaction of various antibodies to COS7 cells subjected to transgenesis with pCMV5-mLSR-myc/DDK such that mSR is transiently expressed was confirmed by FACS. The top row shows mixture of COS7 and mLSR and the bottom row shows only COS7 cells. Various antibodies are shown, which are from the left, #9-7, #16-6, #26-2, #27-2, #1-25, and #1-43.

[0086] FIG. 41 shows that anti-LSR induces cell cycle arrest in RMG-I cells in the G0/G1 phase. The graph shows the percentage of cells in the G0/G1 phase, S phase and G2/M phase. For each phase, results for no treatment, treatment with the control IgG, and treatment with antibody #1-25 are shown from the left. The experiment was carried out with a 6 well plate at 15000 cells/well under the conditions of RPMI 1640 medium+1% FBS+1% penicillin-streptomycin (100 μg/ml antibody condition, 96 hours). Treatment with antibody #1-25 was statistically significant (p<0.0001) (one way ANOVA and Dunnett's test).

[0087] FIG. 42 shows that anti-LSR antibodies enhance p27 expression, suppress cyclin D1 expression, suppress Rb and MAPK activity, and suppress cell growth. Expression was observed by Western blot. The left panel shows, from the top, p27, cyclin D1, phosphorylated Rb (retinoblastoma protein; Ser780), phosphorylated Rb (Ser807/811), Rb only, LSR, and GAPDH as a control. The right panel shows, from the top, phosphorylated-MEK1/2, MEK1/2, phosphorylated p44/42 MAPK, p44/42 MAPK, and GAPDH. For each protein, the results of using, from the left, no treatment, mouse IgG2a, and anti-LSR mAb #1-25 are shown.

[0088] FIG. 43 shows that an anti-LSR antibody also has an ADCC non-dependent anti-tumor effect in addition to antitumor effects mediated by ADCC. This is an experiment modeled after RMG-I (NOD/SCID). The graph shows days after treatment (horizontal axis) and tumor volume (mm³) (vertical axis). The rhombuses indicate the control IgG (N=6) and the triangles indicate treatment with anti-LSR Ab (#1-25) (N=6). *, **, and *** indicate statistical significance (p<0.05, 0.01, and 0.001, Student's t-test), respectively.

[0089] FIG. 44 is another graph showing that an anti-LSR antibody also has ADCC non-dependent anti-tumor effects in addition to an antitumor effect mediated by ADCC. The left side shows the control IgG administered group and the right side shows the anti-LSR antibody (#1-25) administered group. Each group was N=6, and the vertical axis is tumor weight (mg). RMG-I (NOD/SCID) was used as the model. The results were statistically significant (p<0.001, Student's t-test).

[0090] FIG. 45 shows that tumor cells in the growth phase were decreased in vivo by anti-LSR antibodies. Anti-Ki67 antibodies were used for immunohistochemical staining, and RMG-I (NOD-SCID) was used. The left column shows the control IgG administered group, and the right column shows the anti-LSR antibody (#1-25) administered group. The top row shows 100 times magnification and the bottom row shows 400 times magnification.

[0091] FIG. 46 shows examination of antitumor effects of anti-LSR antibodies on ovarian cancer cell strain (SKOV3-E1, SKOV3-L45, and xenograph model). #1-25 was used as the LSR antibody, and mouse IgG2a (Sigma M7769) was used as the control. 10 mg/kg was intraperitoneally administered. SKOV3-E1 was used as an empty vector introduced strain, and SKOV3-L45 was used as a strain stably expressing LSRs. The arrows on the top side indicate intraperitoneal administration (every other day, up to day 14), and the bottom indicates tumor volume measurement (every 4 days up to day 16 as well as measurement on day 18). An SCID female 6-week old mouse was used as a model. The tumor size was about 60 mm³ on day 0.

[0092] FIG. 47 shows that an anti-LSR monoclonal antibody exhibits an antitumor effect on an ovarian cancer cell strain xenograft model expressing LSRs. The graph on the left shows SKOV3-L45 (SCID) (strains stably expressing LSRs) and the graph on the right shows SKOV3-E1 (SCID) (empty vector). For each graph, the horizontal axis indicates the days after treatment, and the vertical axis indicates the tumor volume (mm³). The rhombuses indicate the control IgG (N=5) and the triangles indicate treatment with anti-LSR Ab (#1-25) (N=5). *, **, and *** indicate statistical significance (p<0.05, 0.01, and 0.001, Student's t-test), respectively.

[0093] FIG. 48 shows that an anti-LSR monoclonal antibody exhibits an antitumor effect on an ovarian cancer cell strain xenograft model expressing LSRs. The graph on the left shows SKOV3-L45 (SCID) (strains stably expressing LSRs) and the graph on the right shows SKOV3-E1 (SCID) (empty vector). N=5 for each group, and the vertical axis is the tumor weight (mg). The rhombuses indicate the control IgG (N=5) and the triangles indicate treatment with anti-LSR Ab (#1-25) (N=5). As shown, it was demonstrated that anti-LSR monoclonal antibodies do not exhibit an antitumor effect on LSR negative cells, but exhibit an antitumor effect specifically against LSR expressing positive cells (was statistically significant (p<0.00076, Student's t-test)).

[0094] FIG. 49 shows that an LSR incorporates VLDL and promotes lipid metabolism. The left side shows a vector introduced cell, and the right side shows cells forced to express LSRs.

[0095] FIG. 50 shows results of examining intracellular incorporation of LSR monoclonal antibodies. The top row shows results of SKOV3-LSR#45 and the bottom row shows results of SKOV3-Empty#1 (empty vector). The results are shown, from the left, for control treatment, Herceptin treatment, antibody #1-25 treatment, and antibody #9-7 treatment. The arrows indicate various clones of anti-LSR antibodies or Herceptin incorporated into the cell.

[0096] FIG. 51 shows results of examining intracellular incorporation of LSR monoclonal antibodies similar to FIG. 50. The top row shows results for SKOV3-LSR#45 and the bottom row shows SKOV3-Empty#1 (empty vector). From the left, antibodies #16-6, #26-2, #27-6 and #1-43 are shown. The arrows show various clones of anti-LSR antibodies incorporated into the cell.

[0097] FIG. 52 shows the protocol for a safety test on anti-LSR antibodies using a mouse. 1 mg/body weight of mouse IgG2a (Sigma M7769) and anti-LSR antibody #1-26 was intraperitoneally administered to C57BL/6J (8 weeks old) to assess the following items on day 7. The brain, heart, kidney, liver, lung and spleen are selected as the extracted organs. The measured items include while blood cell (WBC), red blood cell (RBC), hemoglobin (Hb), platelet (Plt), total bilirubin (T-Bil), alanine aminotransferase (ALT), alkaline phosphatase (ALP), amylase (Amy), blood urea nitrogen (BUN), chrome (Cr), calcium (Ca), phosphorus (P), total protein (TP), albumin (Alb), sodium (Na), potassium (K), globulin (Globn), and glutamine (Glu). VetScan HMII was used as an automated blood cell counter, and Vet Scan V52 was used as a veterinary biochemical blood analyzer.

[0098] FIG. 53 shows a comparison of control IgG versus anti-LSR antibody (male). In the Table, the left column shows the items, second column from the left shows control IgG (n=3), the third column shows anti-LSR antibodies (n=3), the second column from the right shows normal values, and the right end shows the p value (statistical significance in Student'st-test). In addition to the abbreviations explain in FIG. 52, Ly indicates lymphocytes and Mo indicates monocytes. Gr indicates granulocytes and Hct indicates hematocrit values.

[0099] FIG. 54 shows a comparison of control IgG versus anti-LSR antibody (female). Each of the values is the same as that in FIGS. 52-53.

[0100] FIG. 55 shows a comparison of control IgG versus anti-LSR antibody (male). In the Table, the left column shows the items, the second column from the left shows control IgG (n=3), the third column shows anti-LSR antibodies (n=3), the second column from the right shows normal values, and the right end shows the p value (statistical significance in Student's t-test). The abbreviations are as explained in FIG. 52.

[0101] FIG. 56 shows a comparison of control IgG versus anti-LSR antibody (female). Each of the values is the same as that in FIGS. 52-53 and 55.

### DESCRIPTION OF EMBODIMENTS

[0102] The embodiments of the present invention are described in detail hereinafter. It should be noted that descriptions are omitted when appropriate for the same content in order to avoid complicating the content by repeating. Throughout the entire specification, a singular expression should be understood as encompassing the concept thereof in the plural form, unless specifically noted otherwise. Thus, singular articles (e.g., “a”, “an”, “the” and the like in case of English) should also be understood as encompassing the concept thereof in the plural form unless specifically noted otherwise. Further, the terms used herein should be understood as being used in the meaning that is commonly used in the art, unless specifically noted otherwise. Thus, unless defined otherwise, all terminologies and scientific technical terms that are used herein have the same meaning as the terms commonly understood by those skilled in the art to which the present invention pertains. In case of a contradiction, the present specification (including the definitions) takes precedence.

[0103] First, explanations are provided for the terms and general techniques used in the present invention.

[0104] As used herein, “LSR (lipolysis stimulated lipoprotein receptor)” is generally known as a molecule associated with the metabolism of a low density lipoprotein (LDL). The details of the amino acid sequence or the like of LSRs can be found on the websites of the NCBI (National Center for Biotechnology Information), HGNC (HUGO Gene Nomenclature Committee) or the like. Examples of accession numbers of LSRs described in NCBI are NP_991403 (amino acid) and /NM_205834.3 (mRNA). An example of the amino acid sequence of an LSR is SEQ ID NO: 7. An example of the base sequence of an LSR mRNA is SEQ ID NO: 8. The amino acid sequence of an LSR is not limited, as long as the sequence has LSR activity. Thus, it is understood that not only proteins (or nucleic acid encoding the same) having an amino acid sequence set forth in a specific sequence identification number or accession number, but also a functionally active analog or derivative thereof, a functionally active fragment thereof or homolog thereof, or a mutant encoded by a nucleic acid which hybridizes to a nucleic encoding said protein under a highly stringent condition or lowly stringent condition can also be used in the present invention, as long as they align with the specific objective of the present invention.

[0105] As used herein, “derivative”, “analog”, or “mutant” includes, but is not intended to be limited to, molecules comprising a region substantially homologous to a target protein (e.g., LSR). Such a molecule, in various embodiments, is at least 30%, 40%, 50%, 60%, 70%, 80%, 90%, 95% or 99% identical throughout the amino acid sequence of the same size or in comparison to a sequence aligned by a homology computer program known in the art. Alternatively, a nucleic acid encoding such a molecule can hybridize to a sequence encoding the constituent protein under a (highly) stringent condition, moderately stringent condition, or non-stringent condition. This refers to a product of altering a naturally-occurring protein by an amino acid substitution, deletion and addition, respectively, a protein whose derivative exhibits the biological function of the naturally-occurring protein, although not necessarily to the same degree. For instance, the biological function of such a protein can be investigated by a suitable and available in vitro assay described herein or known in the art. As used herein, “functionally active” refers to polypeptides, i.e., fragments or derivatives, having a structural function, regulatory function or biochemical function of a protein such as biological activity in accordance with an embodiment associated with the polypeptides, i.e., fragments or derivatives, of the present invention. The discussion regarding LSRs in the present invention mainly pertains to humans, but it is understood that many animals other than humans, especially mammals, are within the scope of the present invention, as they are known to express LSRs. Preferably, the functional domain of LSRs e.g., transmembrane domain (positions 260-280) or phosphorylation sites (positions 309, 328, 406, 493, 528, 530, 535, 540, 551, 586, 615, and 646), are conserved.

[0106] A fragment of an LSR in the present invention is a polypeptide comprising any region of the LSR. As long as such a fragment serves the function of interest (e.g., marker or therapeutic target) of the present invention, it is not necessary that the fragment has biological functions of a naturally-occurring LSR.

[0107] Thus, a representative nucleotide sequence of an LSR may be:

(a) a polynucleotide having a base sequence set forth in SEQ ID NO: 7 or a fragment sequence thereof;
(b) a polynucleotide encoding a polypeptide consisting of the amino acid sequence set forth in SEQ ID NO: 8 or a fragment thereof;
(c) a polypeptide encoding a variant polypeptide having a mutation selected from the group consisting of a substitution, addition, and deletion of one or more amino acids in the amino acid sequence set forth in SEQ ID NO: 8, the variable polypeptide having biological activity, or a fragment thereof;
(d) a polynucleotide, which is a splice mutant or an allelic mutant of the base sequence set forth in SEQ ID NO: 7, or a fragment thereof;
(e) a polynucleotide encoding a species homolog of a polypeptide consisting of the amino acid sequence set forth in SEQ ID NO: 8, or a fragment thereof;
(f) a polynucleotide encoding a polypeptide, which hybridizes with the polynucleotide of any one of (a)-(e) under stringent conditions and has biological activity; or
(g) a polynucleotide encoding a polypeptide consisting of abase sequence, which is at least 70%, at least 80%, at least 90%, at least 95%, at least 96%, at least 97%, at least 98%, or at least 99% identical to the polynucleotide of any one of (a)-(e) or a complementary sequence thereof and has biological activity. Biological activity in this regard typically refers to the property of being distinguishable from other proteins that are present in the same organism as a marker or activity of an LSR.

[0108] The amino acid of an LSR may be

(a) a polypeptide consisting of the amino acid sequence set forth in SEQ ID NO: 8 or a fragment thereof;
(b) a polypeptide, which has a mutation selected from the group consisting of a substitution, addition, and deletion of one or more amino acids in the amino acid sequence set forth in SEQ ID NO: 8 and has biological activity;
(c) a polypeptide encoded by a splice mutant or an allelic mutant of the base sequence set forth in SEQ ID NO: 7;
(d) a polypeptide, which is a species homolog of the amino acid sequence set forth in SEQ ID NO: 8;
(e) a polypeptide, which has an amino acid sequence that is at least 70%, at least 80%, at least 90%, at least 95%, at least 96%, at least 97%, at least 98%, or at least 99% identical to the polypeptide of any one of (a)-(d) and has biological activity. Biological activity in this regard typically refers to the property of being distinguishable from other proteins that are present in the same organism as a marker or activity of an LSR (for example, when used as an antigen, a property of comprising a region that can function as a specific epitope).

[0109] In the context of the present invention, “substance that binds to an LSR”, “LSR binding agent”, or “LSR interaction molecule” is a molecule or substance that binds at least transiently to an LSR. For detection purposes, it is preferable that such a molecule or substance is advantageously capable of indicating that the molecule or substance is bound (i.e., labelled or in a labelable state). For therapeutic purposes, it is more advantageous that such a molecule or substance is bound to a therapeutic agent. Examples of a substance that binds to an LSR include antibodies, antisense oligonucleotides, siRNAs, low molecular weight molecules (LMW), binding peptides, aptamers, ribozymes, peptidomimetics and the like. A substance that binds to an LSR or LSR interaction molecule may be an LSR inhibitor, and encompasses, for instance, binding proteins or binding peptides directed to an LSR, especially those directed to an active site of an LSR, as well as nucleic acids directed to a gene of an LSR. A nucleic acid directed to an LSR refers to, for example, a double stranded or single stranded DNA or RNA inhibiting the expression of an LSR gene or activity of an LSR or a modified product or derivative thereof, including, but not limited to, antisense nucleic acids, aptamers, siRNAs (small interfering RNA) and ribozymes. As used herein, “binding protein” or “binding peptide”, with respect to an LSR, refers to any protein or peptide that binds to the LSR, including, but not limited to, antibodies directed to the LSR (e.g., polyclonal antibodies or monoclonal antibodies), antibody fragments and functional equivalents.

[0110] As used herein, “protein”, “polypeptide”, “oligopeptide” and “peptide” are used herein in the same meaning and refer to an amino acid polymer of any length. The polymer may be straight, branched or cyclic. An amino acid may be a naturally-occurring, non-naturally occurring or altered amino acid. The term may also encompass those assembled into a complex of multiple polypeptide chains. The term also encompasses naturally-occurring or artificially altered amino acid polymers. Examples of such an alteration include disulfide bond formation, glycosylation, lipidation, acetylation, phosphorylation, and any other manipulation or alteration (e.g., conjugation with a labeling component). The definition also encompasses, for example, polypeptides comprising one or more analogs of an amino acid (e.g., including non-naturally occurring amino acids and the like), peptide-like compounds (e.g., peptoids) and other alterations in the art. As used herein, “amino acid” is a general term for organic compounds with an amino group and a carboxyl group. When the antibody according to an embodiment of the present invention comprises a “specific amino acid sequence”, any of the amino acids in the amino acid sequence may be chemically modified. Further, any of the amino acids in the amino acid sequence may be forming a salt or a solvate. Further, any of the amino acids in the amino acid sequence may have an L form or a D form. Even for such cases, the protein according to an embodiment of the present invention is considered as comprising the above-described “specific amino acid sequence”. Examples of known chemical modifications applied to an amino acid comprised in a protein in a living body include modifications of the N-terminus (e.g., acetylation, myristylation and the like), modifications of the C-terminus (e.g., amidation, addition of glycosylphosphatidylinositol and the like) modifications of a side chain (e.g., phosphorylation, glycosylation and the like) and the like. The modifications may be naturally-occurring or non-naturally occurring, as long as the objective of the present invention is met.

[0111] As used herein, “polynucleotide”, “oligonucleotide” and “nucleic acid” are used herein in the same meaning, and refer to a polymer of nucleotides with any length. The terms also encompass “oligonucleotide derivative” and “polynucleotide derivative”. “Oligonucleotide derivative” and “polynucleotide derivative” refer to an oligonucleotide or polynucleotide that comprises a nucleotide derivative or has a bond between nucleotides which is different from normal. The terms are used interchangeably. Specific examples of such an oligonucleotide include 2′-O-methyl-ribonucleotide, oligonucleotide derivatives having a phosphodiester bond in an oligonucleotide converted to a phosphorothioate bond, oligonucleotide derivatives having a phosphodiester bond in an oligonucleotide converted to an N3′-P5′ phosphor amidate bond, oligonucleotide derivatives having ribose and phosphodiester bond in an oligonucleotide converted to a peptide nucleic acid bond, oligonucleotide derivatives having uracil in an oligonucleotide replaced with C-5 propinyluracil, oligonucleotide derivatives having uracil in an oligonucleotide replaced with C-5 thiazoluracil, oligonucleotide derivatives having cytosine in an oligonucleotide replaced with C-5 propinylcytosine, oligonucleotide derivatives having cytosine in an oligonucleotide replaced with phenoxazine-modified cytosine, oligonucleotide derivatives having ribose in DNA replaced with 2′-O-propylribose, oligonucleotide derivatives having ribose in an oligonucleotide replaced with 2′-methoxyethoxyribose and the like. Unless noted otherwise, specific nucleic acid sequences are also intended to encompass conservatively altered variants (e.g., degenerate codon substitute) and complement sequences as well as the expressly shown sequences. Specifically, degenerate codon substitutes can be achieved by preparing a sequence with the third position of one or more selected (or all) codons substituted with a mixed base and/or deoxyinosine residue (Batzer et al., Nucleic Acid Res 19: 5081 (1991); Ohtsuka et al., J. Biol. Chem. 260: 2605-2608 (1985); Rossolini et al., Mol. Cell. Probes 8: 91-98 (1994)). As used herein, “nucleic acid” is used interchangeably with a gene, cDNA, mRNA, oligonucleotide, and polynucleotide. As used herein, “nucleotide” may be a naturally-occurring or non-naturally occurring.

[0112] As used herein, “gene” refers to an agent defining a genetic trait. “Gene” may refer to “polynucleotide”, “oligonucleotide” and “nucleic acid”.

[0113] As used herein, “homology” of genes refers to the level of identity of two or more genetic sequences with one another. In general, having “homology” refers to having a high level of identity or similarity. Thus, two genes with high homology have higher identity or similarity of sequences. It is possible to investigate whether two types of genes are homologous by direct comparison of sequences or, for nucleic acids, by a hybridization method under a stringent condition. When two genetic sequences are directly compared, the genes are homologous when DNA sequences are representatively at least 50% identical, preferably at least 70% identical, and more preferably at least 80%, 90%, 95%, 96%, 97%, 98%, or 99% identical between the genetic sequences. Thus, as used herein, “homolog” or “homologous gene product” refers to a protein in another species, preferably mammal, exerting the same biological function as a protein constituent of a complex which will be further described herein. Such a homolog is also called “ortholog gene product”. It is understood that such a homolog, homologous gene product, ortholog gene product or the like can also be used, as long as they are in alignment with the objective of the present invention.

[0114] Amino acids may be mentioned herein by either their commonly known three letter symbols or their one character symbols recommended by the IUPAC-IUB Biochemical Nomenclature Commission. Similarly, nucleotides may be mentioned by their commonly recognized one character codes. Comparison of similarity, identity and homology of an amino acid sequence and a base sequence is calculated herein by using a default parameter using a sequence analysis tool, BLAST. For example, identity can be searched by using BLAST 2.2.28 (published on Apr. 2, 2013) of the NCBI. Herein, values for identity generally refer to a value obtained by alignment under the default condition using the above-described BLAST. However, when a higher value is obtained by changing a parameter, the highest value is considered the value of identity. When identity is evaluated in a plurality of regions, the highest value there among is considered the value of identity. Similarity is a value calculated by taking into consideration a similar amino acid in addition to identity.

[0115] In one embodiment of the present invention, “several” may be, for example, 10, 8, 6, 5, 4, 3 or 2, or a value less than any one of the values. It is known that a polypeptide with one or several amino acid residue deletions, additions, insertions, or substitutions by other amino acids maintains its biological activity (Market al., Proc Natl Acad Sci USA. 1984 September; 81 (18): 5662-5666., Zoller et al., Nucleic Acids Res. 1982 Oct. 25; 10(20): 6487-6500., Wang et al., Science. 1984 Jun. 29; 224 (4656): 1431-1433.). An antibody with a deletion or the like can be made, for example, by site-directed mutagenesis, random mutagenesis, biopanning using an antibody phage library or the like. For example, KOD-Plus-Mutagenes is Kit (TOYOBO CO., LTD.) can be used for site-directed mutagenesis. An antibody with the same activity as the wild-type can be selected from mutant antibodies introduced with a deletion or the like by performing various characterizations such as FACS analysis and ELISA.

[0116] In one embodiment of the present invention, “90% or greater” may be, for example, 90, 95, 96, 97, 98, 99 or 100% or greater or within the range of any two values described above. For the above-described “homology”, the percentage of the number of homologous amino acids in two or a plurality of amino acid sequences may be calculated in accordance with a known method in the art. Before calculating the percentage, amino acid sequences in a group of amino acid sequences to be compared are aligned. A space is introduced in a portion of amino acid sequences when necessary to maximize the percentage of the same amino acids. An alignment method, method of calculating the percentage, comparison method, and computer programs associated therewith have been well known in the art (e.g., BLAST, GENETYX and the like). As used herein, “homology” can be represented by a value measured with BLAST of the NCBI, unless specifically noted otherwise. Blastp can be used in the default setting for an algorithm for comparing amino acid sequences with BLAST. Results of measurement are expressed in a numerical form as Positives or Identities.

[0117] As used herein, “polynucleotide which hybridizes under a stringent condition” refers to commonly used, well-known conditions in the art. Such a polynucleotide can be obtained by using a method such as colony hybridization, plaque hybridization, or southern blot hybridization while using a polynucleotide selected from among the polynucleotides of the present inventions as a probe. Specifically, the above-described polynucleotide refers to a polynucleotide that can be identified by using a filter with immobilized DNA from a colony or plaque and performing hybridization at 65° C. in the presence of 0.7-1.0 M NaCl and then using an SSC (saline-sodium citrate) solution with 0.1-2 times concentration (composition of an SSC solution with 1 time concentration is 150 mM sodium chloride and 15 mM sodium citrate) to wash the filter under the condition of 65° C. For “stringent condition”, the following are examples of conditions that can be used. (1) low ionic strength and a high temperature are used for washing (e.g., 0.015 M sodium chloride/0.0015 M sodium citrate/0.1% sodium dodecyl sulfate at 50° C.), (2) a denaturing agent such as formamide is used in hybridization (e.g., 50% (v/v) formamide, 0.1% bovine serum albumin/0.1% ficoll/0.1% polyvinyl pyrrolidone/50 mM sodium phosphate buffer with a pH of 6.5, 750 mM sodium chloride, and 75 mM sodium citrate at 42° C.), or (3) a solution comprising 20% formamide, 5×SSC, 50 mM sodium phosphate (pH 7.6), 5×Denhardt's solution, 10% dextran sulfate, and 20 mg/ml denatured sheared salmon sperm DNA, is incubated overnight at 37° C. and then a filter is washed with 1×SSC at about 37-50° C. The formamide concentration may be 50% or greater. Washing time may be 5, 15, 30, 60, 120 minutes, or greater. A plurality of elements are considered to affect stringency in a hybridization reaction such as temperature, salt concentration and the like. Ausubel et al., Current Protocols in Molecular Biology, Wiley Interscience Publishers, (1995) can be referred for details. “Highly stringent condition”, for example, is 0.0015 M sodium chloride, 0.0015 M sodium citrate, and 65-68° C. or 0.015 M sodium chloride, 0.0015 M sodium citrate, 50% formamide and 42° C. Hybridization can be performed in accordance with the method described in experimental publications such as Molecular Cloning 2^{nd} ed., Current Protocols in Molecular Biology, Supplement 1-38, DNA Cloning 1: Core Techniques, A Practical Approach, Second Edition, Oxford University Press (1995). In this regard, a sequence comprising only an A sequence or only a T sequence is preferably excluded from a sequence that hybridizes under stringent conditions. A moderately stringent condition can be readily determined by those skilled in the art based on, for example, the length of a DNA and is shown in Sambrook et al., Molecular Cloning: A Laboratory Manual, Third Ed., Vol. 1, 7.42-7.45 Cold Spring Harbor Laboratory Press, 2001, including, for a nitrocellulose filters, use of hybridization conditions of a pre-wash solution of 1.0 mM EDTA (pH 8.0), 5×SSC, 0.5% SDS, and about 50% formamide and 2×SSC-6×SSC at about 40-50° C. (or other similar hybridization solutions such as a Stark's solution in about 50% formamide at about 42° C.) and washing conditions of 0.5×SSC, 0.1% SDS at about 60° C. Thus, the polypeptides used in the present invention encompass polypeptides encoded by a nucleic acid molecule that hybridizes under highly or moderately stringent conditions to a nucleic acid molecule encoding a polypeptide described in the present invention in particular.

[0118] As used herein, a “purified” substance or biological agent (e.g., nucleic acid, protein or the like) refers to a substance or a biological agent from which at least a part of an agent naturally accompanying the substance or biological agent has been removed. Thus, the purity of a biological agent in a purified biological agent is generally higher than the purity in the normal state of the biological agent (i.e., concentrated). The term “purified” as used herein refers to the presence of preferably at least 75% by weight, more preferably at least 85% by weight, still more preferably at least 95% by weight, and most preferably at least 98% by weight of a biological agent of the same type. The substance or biological agent used in the present invention is preferably a “purified” substance. An “isolated” substance or biological agent (e.g., nucleic acid, protein, or the like) as used herein refers to a substance or biological agent having agents that naturally accompany the substance or biological agent substantially removed. The term “isolated” as used herein varies depending on the objective. Thus, the term does not necessarily have to be represented by purity. However, when necessary, the term refers to the presence of preferably at least 75% by weight, more preferably at least 85% by weight, still more preferably at least 95% by weight, and most preferably at least 98% by weight of a biological agent of the same type. The substance used in the present invention is preferably an “isolated” substance or biological agent.

[0119] As used herein, a “corresponding” amino acid, nucleic acid, or moiety refers to an amino acid or a nucleotide which has or is expected to have, in a certain polypeptide molecule or polynucleotide molecule (e.g., LSR), similar action as a predetermined amino acid, nucleotide or moiety in a benchmark polypeptide or a polynucleotide for comparison, and, particularly in the case of enzyme molecules, refers to an amino acid which is present at a similar position in an active site and makes a similar contribution to catalytic activity and refers to a corresponding moiety in a complex molecule (e.g., transmembrane domain or the like). For example, for an antisense molecule, it can be a similar moiety in an ortholog corresponding to a specified moiety of the antisense molecule. A corresponding amino acid can be a specified amino acid subjected to, for example, cysteination, glutathionylation, S—S bond formation, oxidation (e.g., oxidation of methionine side chain), formylation, acetylation, phosphorylation, glycosylation, myristylation or the like. Alternatively, a corresponding amino acid can be an amino acid responsible for dimerization. Such a “corresponding” amino acid or nucleic acid may be a region or a domain over a certain range. Thus, it is referred herein as a “corresponding” region or domain in such a case. Such a corresponding region or domain is useful for designing a complex molecule in the present invention.

[0120] As used herein, a “corresponding” gene (e.g., polynucleotide sequence or molecule) refers to a gene (e.g., polynucleotide sequence or molecule) of a certain species which has or is expected to have similar action as a predetermined gene in a benchmark species for comparison. When there is a plurality of genes having such action, the corresponding gene refers to a gene having the same evolutionary origin. Hence, a gene corresponding to a certain gene may be an ortholog of such a gene. Thus, an LSR corresponding to human LSRs can be found in other animals (especially mammals). Such a corresponding gene can be identified by using a technique that is well known in the art. For example, a corresponding gene in a certain animal (e.g., mouse) can be found by searching a database comprising sequences of the animal from using the sequence of SEQ ID NO: 7, 8 or the like as a query sequence, as a benchmark gene of the corresponding gene (e.g., LSR or the like).

[0121] As used herein, “fragment” refers to a polypeptide or polynucleotide with a sequence length of 1 to n−1 with respect to the full length polypeptide or polynucleotide (with length n). The length of a fragment can be appropriately changed in accordance with the objective. Examples of the lower limit of such a length include 3, 4, 5, 6, 7, 8, 9, 10, 15, 20, 25, 30, 40, 50 and more amino acids for a polypeptide. Lengths represented by an integer that is not specifically listed herein (e.g., 11 and the like) also can be suitable as a lower limit. Further, examples of length include 5, 6, 7, 8, 9, 10, 15, 20, 25, 30, 40, 50, 75, 100, and more nucleotides for a polynucleotide. Lengths represented by an integer that is not specifically listed herein (e.g., 11 and the like) also can be suitable as a lower limit. As used herein, such a fragment is understood to be within the scope of the present invention, for example, when a full length version functions as a marker or a target molecule, as along as the fragment itself also functions as a marker or a target molecule.

[0122] The term “activity” according to the present invention refers to a function of a molecule in the broadest sense herein. Activity, although not intended to be limiting, generally includes a biological function, biochemical function, physical function, and chemical function of a molecule. Examples of activity include enzymatic activity, an ability to interact with another molecule, an ability to activate, promote, stabilize, inhibit, suppress, or destabilize a function of another molecule, stability, and an ability to localize at a specific position in a cell. When applicable, the term also relates to a function of a protein complex in the broadest sense.

[0123] As used herein, “biological function”, when referring to a certain gene or a nucleic acid molecule or a polypeptide related thereto, refers to a specific function that the gene, the nucleic acid molecule or the polypeptide may have in a living body. Examples of such a function include, but are not limited to, production of a specific antibody, enzyme activity, impartation of resistance and the like. In the present invention, examples of this function include, but are not limited to, a function of an LSR involved in inhibition of VLDL incorporation or the like. As used herein, biological function can be exerted by “biological activity”. As used herein, “biological activity” refers to the activity a certain agent (e.g., polynucleotide, protein or the like) may have in a living body. Biological activity encompasses an activity of exerting a variety of functions (e.g., transcription promoting activity), and also encompasses, for example, an activity of activating or inactivating another molecule by an interaction with a certain molecule. When two agents interact, biological activity thereof may be a bond between two molecules and a biological change induced thereby. For example, two molecules are considered to be bound together if, when one molecule is precipitated using an antibody, the other molecule co-precipitates. Observation of such co-precipitation is one example of a determination approach. For example, when a certain agent is an enzyme, the biological activity thereof encompasses enzyme activity thereof. In another example, when a certain agent is a ligand, binding to a receptor corresponding to the ligand is encompassed. Such biological activity can be measured by a technique that is well known in the art. Thus, “activity” refers to various measurable indicators, which indicate or reveal a bond (either direct or indirect) or affect a response (i.e., having a measurable effect in response to some exposures of stimuli). Examples thereof includes affinity of a compound that directly binds to the polypeptide or polynucleotide of the present invention, the amount of proteins upstream or downstream after some stimulations or events, or the level of other similar functions.

[0124] As used herein, “expression” of a gene, a polynucleotide, a polypeptide or the like refers to the gene or the like being subjected to a certain action in vivo to be converted into another form. Preferably, expression refers a gene, a polynucleotide or the like being transcribed and translated into a form of a polypeptide. However, transcription to make an mRNA is also one embodiment of expression. Thus, “expression product” as used herein encompasses such a polypeptide or protein, or mRNA. More preferably, such a polypeptide form can be a form which has undergone post-translation processing. For example, the LSR expression level can be determined by any method. Specifically, the LSR expression level can be found by assessing the amount of mRNA of LSRs, the amount of LSR protein, and the biological activity of the LSR protein. The amount of mRNA or protein of LSRs can be determined by the method described in detail in other parts of the specification or a method known in the art.

[0125] As used herein, “functional equivalent” refers to any entity having the same function of interest but a different structure relative to the original target entity. Thus, it is understood that a functional equivalent of “LSR” or an antibody thereof encompasses mutants or variants (e.g., amino acid sequence variant or the like) of the LSR or antibody thereof, not the LSR or antibody thereof itself, which have the biological action of the LSR and those that can change, upon action, into the LSR or the antibody thereof itself or a mutant or variant of the LSR or the antibody thereof (e.g., including nucleic acid encoding an LSR or an antibody thereof itself or a mutant or variant of the LSR or antibody thereof, and vector, cell and the like comprising such a nucleic acid). It is understood, even without specific mention, that a functional equivalent of an LSR or an antibody thereof can be used similarly to the LSR or antibody thereof. A functional equivalent can be found by searching a database or the like. As used herein, “search” refers to utilizing a certain nucleic acid base sequence electronically, biologically, or by another method to find another nucleic acid base sequence having a specific function and/or property. Examples of electronic search include, but are not limited to, BLAST (Altschul et al., J. Mol. Biol. 215: 403-410 (1990)), FASTA (Pearson & Lipman, Proc. Natl. Acad. Sci., USA 85: 2444-2448 (1988)), Smith and Waterman method (Smith and Waterman, J. Mol. Biol. 147: 195-197 (1981)), Needleman and Wunsch method (Needleman and Wunsch, J. Mol. Biol. 48: 443-453 (1970)) and the like. Examples of biological search include, but are not limited to, stringent hybridization, a macroarray with a genomic DNA applied to a nylon membrane or the like or a microarray with a genomic DNA applied to a glass plate (microarray assay), PCR, in situ hybridization and the like. Herein, a gene used in the present invention is intended to include corresponding genes identified by such electronic search or biological search.

[0126] As a functional equivalent of the present invention, it is possible to use an amino acid sequence with one or more amino acid insertions, substitutions or deletions, or addition to one or both ends. As used herein, “one or more amino acid insertions, substitutions or deletions, or addition to one or both ends” in an amino acid sequence refers to an alteration with a substitution of a plurality of amino acids or the like to the extent that can occur naturally by a well-known technical method such as site-directed mutagenesis or natural mutation. An altered amino acid sequence can have, for example, 1-30, preferably 1-20, more preferably 1-9, still more preferably 1-5, and especially preferably 1-2 amino acid insertions, substitutions or deletions or additions to one or both ends. Preferably, an altered amino acid sequence may be an amino acid sequence having one or more (preferably 1 or several, or 1, 2, 3 or 4) conservative substitutions in an LSR amino acid sequence. “Conservative substitution” refers herein to a substitution of one or more amino acid residues with other chemically similar amino acid residue so as not to substantially alter a function of a protein. Examples thereof include cases where a hydrophobic residue is substituted with another hydrophobic residue, cases where a polar residue is substituted with another polar residue having the same charge and the like. Functionally similar amino acids that can be substituted in this manner are known in the art for each amino acid. Specific examples include alanine, valine, isoleucine, leucine, proline, tryptophan, phenylalanine, methionine and the like for nonpolar (hydrophobic) amino acids, glycine, serine, threonine, tyrosine, glutamine, asparagine, cysteine and the like for polar (neutral) amino acids. Examples of positively charged (basic) amino acid include arginine, histidine, lysine and the like. Further, examples of a negatively-charged (acidic) amino acid include aspartic acid, glutamic acid and the like.

[0127] As used herein, “suppressant” refers to a substance or agent that inhibits biological action of a receptor or a cell against a target entity (e.g., receptor or cell). An LSR suppressant of the present invention is an agent that can temporarily or permanently reduce or eliminate a function of a target LSR, a cell expressing an LSR or the like. Examples of such a factor include, but are not limited to, antibodies, antigen binding fragments thereof, derivatives, functional equivalents, antisenses, RNAi agents such as siRNAs and other nucleic acid forms.

[0128] As used herein, “agonist” refers to a substance that expresses or enhances biological action of a receptor against a target entity (e.g., receptor). Examples thereof include natural agonists (also referred to as ligands), as well as synthesized agonists, altered agonists and the like.

[0129] As used herein, “antagonist” refers to a substance that suppresses or inhibits the expression of biological action of a receptor against a target entity (e.g., receptor). Examples thereof include natural antagonists (also referred to as ligands), as well as synthesized antagonists, altered antagonists and the like. Antagonists include those that competitively or non-competitively suppress or inhibit expression against an agonist. An antagonist can also be obtained by altering an agonist. Since physiological phenomena are suppressed or inhibited, an antagonist may be encompassed in the concept of suppressant (inhibitor) or suppressing agent. Thus, antagonists as used herein are substantially used synonymously with “suppressant”.

[0130] As used herein, an “antibody” includes, in a broad sense, polyclonal antibodies, monoclonal antibodies, multi-specific antibodies, chimeric antibodies, anti-idiotype antibodies, and fragments thereof such as Fv fragments Fab′ fragments, F(ab′)₂ and Fab fragments, as well as other conjugates or functional equivalents produced by recombination (e.g., chimeric antibodies, humanized antibodies, multifunctional antibodies, bispecific or oligospecific antibodies, single chain antibodies, scFV, diabodies, sc(Fv)₂ (single chain (Fv)₂), and scFv-Fc). Furthermore, such an antibody may be fused, by a covalently bond or recombination, with an enzyme such as alkaline phosphatase, horseradish peroxidase, or a galactosidase. The anti-LSR antibody used in the present invention is sufficient if it binds to a protein of LSRs, regardless of the origin, type, shape or the like thereof. Specifically, known antibodies such as a non-human animal antibody (e.g., a mouse antibody, a rat antibody, or a camel antibody), a human antibody, a chimeric antibody, or a humanized antibody can be used. In the present invention, a monoclonal or polyclonal antibody can be utilized as an anti-LSR antibody, but a monoclonal antibody is preferable. It is preferable that an antibody binds specifically to an LSR protein.

[0131] Further, antibodies encompass modified and non-modified antibodies. Modified antibodies may be formed by an antibody binding to various molecules such as polyethylene glycol. A modified antibody can be obtained by applying a chemical modification to an antibody by using a known approach.

[0132] “Anti-LSR antibody” in one embodiment of the present invention encompasses antibodies having binding affinity to LSRs. The production method of such an anti-LSR antibody is not particularly limited. For example, the antibody may be produced by immunizing mammals or birds with an LSR.

[0133] Further, it is understood that examples of a “functional equivalent” of an “antibody to LSR (anti-LSR antibody) or a fragment thereof” includes, for antibodies, antibodies themselves having LSR binding activity and optionally suppressing activity and fragments thereof themselves, as well as chimeric antibodies, humanized antibodies, multifunctional antibodies, bispecific or oligospecific antibodies, single chain antibodies, scFV, diabodies, sc(Fv)₂ (single chain(Fv)₂), scFv-Fc and the like.

[0134] The anti-LSR antibody according to one embodiment of the present invention is preferably an anti-LSR antibody that specifically binds to a specific epitope of an LSR from the viewpoint of malignant tumor growth being particularly highly suppressed.

[0135] The anti-LSR antibody according to one embodiment of the present invention may be a monoclonal antibody. A monoclonal antibody can be made to more efficiently act against an LSR relative to a polyclonal antibody. It is preferred that a chicken is immunized with an LSR from the viewpoint of efficient production of anti-LSR monoclonal antibodies.

[0136] The antibody class of the anti-LSR antibody according to one embodiment of the present invention is not particularly limited. For example, the class may be IgM, IgD, IgG, IgA, IgE, or IgY.

[0137] The anti-LSR antibody according to one embodiment of the present invention may be an antibody fragment having antigen binding activity (hereinafter, also referred to as “antigen binding fragment”). In such a case, there is an effect of improved stability, antibody production efficiency or the like.

[0138] The anti-LSR antibody according to one embodiment of the present invention may be a fusion protein. The fusion protein may comprise a polypeptide or oligopeptide bound to the N or C-terminus of an anti-LSR antibody. The oligopeptide in this regard may be an His-tag. The fusion protein may also be fused to a mouse, human, or chicken antibody partial sequence. Such fusion proteins are also encompassed as one form of the anti-LSR antibody according to the present embodiment.

[0139] The anti-LSR antibody according to one embodiment of the present invention may be, for example, an antibody obtained via the step of immunizing an organism with a purified LSR, LSR-expressing cell, or an LSR containing lipid membrane. It is preferable that an LSR-expressing cell is used for immunization from the viewpoint of enhancing a therapeutic effect against LSR positive malignant tumor.

[0140] The anti-LSR antibody according to one embodiment of the present invent ion may be an antibody having a CDR set of an antibody obtained via the step of immunizing an organism with a purified LSR, LSR-expressing cell, or an LSR containing lipid membrane. It is preferable that an LSR-expressing cell is used for immunization from the viewpoint of enhancing a therapeutic effect against LSR positive malignant tumor. A CDR set is a set of heavy chain CDRs 1, 2, and 3 and light chain CDRs 1, 2, and 3.

[0141] “LSR expressing cell” in one embodiment of the present invention may be obtained, for example, by introducing a polynucleotide encoding an LSR into a cell and having the LSR expressed. LSRs in this regard encompass LSR fragments. Further, “LSR-containing lipid membrane” in one embodiment of the present invention may be obtained, for example, by mixing an LSR and a lipid bilayer. LSRs in this regard encompass LSR fragments. Further, the anti-LSR antibody according to one embodiment of the present invention is preferably an antibody obtained via the step of immunizing a chicken with an antigen or an antibody having a CDR set of such an antibody from the viewpoint of enhancing a therapeutic effect against LSR positive malignant tumor.

[0142] The anti-LSR antibody according to one embodiment of the present invention may have any binding strength as long as the object can be accomplished. Examples thereof include, but are not limited to, at least 1.0×10⁶ or greater, 2.0×10⁶ or greater, 5.0×10⁶ or greater, and 1.0×10⁷ or greater. The K_{D} value (kd/ka) generally may be 1.0×10⁻⁷(M) or less and can be 1.0×10⁻⁹(M) or 1.0×10⁻¹⁰ or less.

[0143] The anti-LSR antibody according to one embodiment of the present invention may have ADCC or CDC activity.

[0144] The anti-LSR antibody according to one embodiment of the present invention may be an antibody that binds to a wild-type or mutant LSR. Mutant LSRs include mutants due to a difference in the DNA sequences among individuals. The amino acid sequence of a wild-type or mutant LSR is preferably 80% or more, more preferably 90% or more, more preferably 95% or more, and especially preferably 98% or more homologous to the amino acid sequence set forth in SEQ ID NO: 8.

[0145] “Antibody” in one embodiment of the present invention encompasses molecules capable of specifically binding to a specific epitope on an antigen and populations thereof. Further, the antibody may be a polyclonal antibody or monoclonal antibody. The antibody can be present in various forms. For example, the antibody may be in one or more types of forms selected from the group consisting of a full-length antibody (antibody having an Fab region and an Fc region), Fv antibody, Fab antibody, F(ab′)₂ antibody, Fab′ antibody, diabody, single chain antibody (e.g., scFv), dsFv, multi-specific antibody (e.g., bispecific antibody), peptide or polypeptide having antigen binding affinity, chimeric antibody (e.g., mouse-human chimeric antibody, chicken-human chimeric antibody or the like), mouse antibody, chicken antibody, humanized antibody, human antibody, and similar antibodies (or equivalents). Further, the antibody encompasses modified or non-modified antibodies. Modified antibodies may be formed by an antibody binding to various molecules such as polyethylene glycol. A modified antibody can be obtained by applying a chemical modification to an antibody by using a known approach. Furthermore, such an antibody may be fused by a covalent bond or recombination with an enzyme such as alkaline phosphatase, horseradish peroxidase, or a galactosidase. The anti-LSR antibody used in the present invention is sufficient if it binds to an LSR protein, regardless of the origin, type, shape or the like thereof. Specifically, known antibodies such as a non-human animal antibody (e.g., a mouse antibody, a rat antibody, or a camel antibody), a human antibody, a chimeric antibody, or a humanized antibody can be used. In the present invention, a monoclonal or polyclonal antibody can be utilized as the anti-LSR antibody, but a monoclonal antibody is preferable. It is preferable that an antibody binds specifically to an LSR protein. Further, the antibody encompasses modified and non-modified antibodies. Modified antibodies may be formed by an antibody binding to various molecules such as polyethylene glycol. A modified antibody can be obtained by applying a chemical modification to an antibody by using a known approach.

[0146] “Polyclonal antibody” in one embodiment of the present invention can be produced, for example, by administering an immunogen comprising an antigen of interest to mammals (e.g., rat, mouse, rabbit, cow, monkey or the like), birds or the like in order to induce production of a polyclonal antibody specific to the antigen. An immunogen may be administered by one or more immunizing agents and, when desired, an injection of an adjuvant. An adjuvant may be used to increase immune responses and may comprise a Freund's adjuvant (complete or incomplete), mineral gel (aluminum hydroxide or the like), surfactant (lysolecithin or the like) or the like. Immunization protocols are known in the art and, in some cases, may be implemented by any method that induces an immune response, which matches the selected host organism (Tanpakushitsu Jikken Handobukku [Protein experiment handbook], Yodosha (2003): 86-91).

[0147] “Monoclonal antibody” in one embodiment of the present invention encompasses individual antibodies constituting a population being antibodies corresponding to substantially a single epitope except for antibodies having a mutation that can occur naturally in small amounts. Further individual antibodies constituting a population may be antibodies that are substantially the same except for antibodies having a mutation that can occur naturally in small amounts. Monoclonal antibodies are highly specific, which are different from common polyclonal antibodies that typically include different antibodies corresponding to different epitopes. In addition to their specificity, monoclonal antibodies are useful in that they can be synthesized from hybridoma culture which is not contaminated with other immunoglobulins. The description “monoclonal” may indicate a characteristic of being obtained from a substantially homogeneous antibody population. However, such a description does not mean that antibodies must be produced by a specific method. For example, monoclonal antibodies may be made by a method similar to a hybridoma method as described in “Kohler G, Milstein C., Mature. 1975 Aug. 7; 256 (5517): 495-497”. Alternatively, monoclonal antibodies may be made by a method similar to a recombinant method as described in U.S. Pat. No. 4,816,567. Further, monoclonal antibodies may be isolated from a phage antibody library using a method similar to the technique that is described in, “Clackson et al., Mature. 1991 Aug. 15; 352 (6336): 624-628.” or, “Marks et al., J Mol Biol. 1991 Dec. 5; 222 (3): 581-597”. Further, monoclonal antibodies may be made by the method described in “Tanpakushitsu Jikken Handobukku [Protein experiment handbook], Yodosha (2003): 92-96”.

[0148] Antibodies can be mass-produced by using any approach that is known in the art. Examples of construction of mass production system for a representative antibody and antibody manufacture include the following. Specifically, an H chain antibody expression vector and L chain antibody expression vector are transfected into a CHO cell. The cells are cultured by using a selection reagent G418 and Zeocin and cloned by limiting dilution. After cloning, clones stably expressing antibodies are selected by ELISA. The culture is expanded with selected CHO cells, and the culture supernatant comprising antibodies are collected. Antibodies can be purified from the collected culture supernatant by Protein A or Protein G purification.

[0149] “Fv antibody” in one embodiment of the present invention is an antibody comprising an antigen recognition site. This region comprises a dimer of one heavy chain variable domain non-covalently bound to one light chain variable domain. In this configuration, three CDRs of each variable domain can interact with one another to form an antigen binding site on the surface of a VH-VL dimer.

[0150] “Fab antibody” in one embodiment of the present invention is, for example, a fragment obtained by treating an antibody comprising an Fab region and an Fc region with proteinase papain, which is an antibody in which about half of the N-terminus side of the H chain is bound to the entire L chain via some disulfide bonds. Fabs can be obtained, for example, by treating the anti-LSR antibody according to the embodiments of the present invention comprising an Fab region and an Fc region with proteinase papain.

[0151] “F(ab′)₂ antibody” in one embodiment of the present invention is a fragment obtained by treating an antibody comprising an Fab region and an Fc region with proteinase pepsin, which is an antibody comprising two sites corresponding to Fabs. F(ab′)₂ can be obtained, for example, by treating the anti-LSR antibody according to the embodiments of the present invention comprising an Fab region and an Fc region with proteinase pepsin. For example, the following Fab′ can be made by thioether bond or a disulfide bond.

[0152] “Fab′ antibody” in one embodiment of the present invention is an antibody obtained, for example, by cleaving a disulfide bond of a hinge region of F(ab′)₂. For example, F(ab′)₂ can be obtained through treatment with a reducing agent dithiothreitol.

[0153] “ScFv antibody” in one embodiment of the present invention is an antibody comprising VH and VL linked with a suitable peptide linker. ScFv antibodies can be produced, for example, by obtaining a cDNA encoding VH and VL of the anti-LSR antibody according to the embodiment of the present invention, constructing a polynucleotide encoding VH-peptide linker-VL, incorporating the polynucleotide into a vector, and using a cell for expression.

[0154] “Diabody” in one embodiment of the present invention is an antibody having divalent antigen binding activity. Divalent antigen binding activity can be configured to be identical or configured such that one of them has a different antigen binding activity. A diabody can be produced, for example, by constructing a polynucleotide encoding scFv such that the length of the amino acid sequence of a peptide linker is 8 residues or less, incorporating the resulting polynucleotide into a vector and using a cell for expression.

[0155] “dsFv” in one embodiment of the present invention is an antibody in which a polypeptide introduced with cysteine residues in VH and VL is bound via a disulfide bond between the above-described cysteine residues. The position to which cysteine residues are introduced can be selected based on steric structure prediction of an antibody in accordance with the method demonstrated by Reiter et al (Reiter et al., Protein Eng. 1994 May; 7(5): 697-704).

[0156] “Peptide or polypeptide with antigen binding affinity” in one embodiment of the present invention is an antibody comprised of antibody VH, VL or CD1, 2 or 3 thereof. A peptide comprising a plurality of CDRs can be bound directly or via a suitable peptide linker.

[0157] The production method of the above-described Fv antibody, Fab antibody, F(ab′)₂ antibody, Fab′ antibody, scFv antibody, diabody, dsFv antibody, and peptide or polypeptide having antigen binding affinity (hereinafter, also referred to as “Fv antibodies”) is not particularly limited. Fv antibodies can be produced, for example, by incorporating a DNA encoding a region of the Fv antibodies in the anti-LSR antibody according to the embodiment of the present invention into an expression vector and using an expression cell. Further, Fv antibodies may be produced by a chemical synthesis method such as the Fmoc (fluorenylmethyloxycarbonyl) or tBOC (t-butyloxycarbonyl) method. It should be noted that the antigen binding fragment according to one embodiment of the present invention may be one or more types of the above-described Fv antibodies.

[0158] “Chimeric antibody” in one embodiment of the present invention is, for example, a variable region of an antibody linked to a constant region of an antibody between xenogenic organisms and can be constructed by a genetic engineering technique. A mouse-human chimeric antibody can be made by, for example, the method described in “Roguska et al., Proc Natl Acad Sci USA. 1994 Feb. 1; 91 (3): 969-973.” For example, the basic method of making a mouse-human chimeric antibody links a mouse leader sequence and a variable region sequence in a cloned cDNA with a sequence encoding a human antibody constant region already present in an expression vector of a mammalian cell. Further, after linking the mouse leader sequence and variable region sequence in a cloned cDNA with the sequence encoding a human antibody constant region, the resultant sequence may be linked with a mammalian cell expression vector. A fragment of a human antibody constant region can be from any human antibody H chain constant region and human antibody L chain constant region. Examples of human H chain fragment include Cγ1, Cγ2, Cγ3, and Cγ4, and examples of L chain fragment include Cλ and Cκ.

[0159] “Humanized antibody” in one embodiment of the present invention is, for example, an antibody, which has one or more CDRs from non-human species, a framework region (FR) from a human immunoglobulin, and a constant region from human immunoglobulin and binds to a desired antigen. Antibodies can be humanized by using various approaches known in the art (Almagro et al., Front Biosci. 2008 Jan. 1; 13: 1619-1633). Examples thereof include CDR grafting (Ozaki et al., Blood. 1999 Jun. 1; 93(11): 3922-3930.), Re-surfacing (Roguska et al., Proc Natl Acad Sci USA. 1994 Feb. 1; 91 (3): 969-973.), FR shuffle (Damschroder et al., Mol Immunol. 2007 April; 44 (11): 3049-3060. Epub 2007 Jan. 22.) and the like. An amino acid residue of a human FR region may be substituted with a corresponding residue from a CDR donor antibody in order to alter (preferably in order to improve) the antigen bond. The FR substitution can be implemented by a method well known in the art (Riechmann et al., Nature. 1988 Mar. 24; 332 (6162):323-327.) For example, an FR residue that is important for antigen binding may be identified by modeling an interaction between a CDR and an FR residue. Further, an abnormal FR residue at a specific position may be identified by sequence comparison.

[0160] “Human antibody” in one embodiment of the present invention is, for example, an antibody in which a region comprising a variable region and constant region of a heavy chain and variable region and constant region of a light chain constituting the antibody is derived from a gene encoding a human immunoglobulin. Main production methods include a method using a transgenic mouse for making human antibodies, phage display and the like. A method using a transgenic mouse for making human antibodies produces human antibodies with diverse antigen binding capabilities instead of mouse antibodies when a functional human Ig gene is introduced into an endogenous Ig knockout mouse. Furthermore, this mouse can be immunized to obtain human monoclonal antibodies by a conventional hybridoma method. Such antibodies can be made, for example, by the method described in “Lonberg et al., Int Rev Immunol. 1995; 13 (1): 65-93.” Phase display is a system that typically expresses an exogenous gene as a fusion protein such that phage infectivity is not lost on the N-terminus side of a coat protein (g3p, g10p, or the like) of fibrous phage such as M13 or T7 which is an E. coli virus. Antibodies can be made, for example, by the method described in “Vaughan et al., Nat Biotechnol. 1996 March; 14 (3): 309-314”.

[0161] Further, antibodies may be prepared by grafting a heavy chain CDR or light chain CDR of the anti-LSR antibody according to the embodiment of the present invention onto any antibody by CDR-grafting (Ozaki et al., Blood. 1999 Jun. 1; 93(11): 3922-3930). Further, antibodies can be obtained by linking a DNA encoding a heavy chain CDR or light chain CDR of the anti-LSR antibody according to the embodiment of the present invention and a DNA encoding a region excluding a heavy chain CDR or light chain CDR of a known antibody derived from a human or a non-human organism to a vector in accordance with a known method in the art and using a known cell for expression. When obtaining antibodies in this manner, a known method in the art (e.g., method of allowing amino acid residues of an antibody to randomly mutate and screening for antibodies with high reactivity, phage display, or the like) may be used to optimize the region excluding a heavy chain CDR or light chain CDR in order to enhance the efficiency of anti-LSR antibody acting upon a target antigen. Further, an FR region may be optimized by using, for example, FR shuffle (Damschroder et al., Mol Immunol. 2007 April; 44 (11): 3049-3060. Epub 2007 Jan. 22.) or a method of replacing a vernier zone amino acid residue or packaging residue (Japanese Laid-Open Publication No. 2006-241026 or Foote et al., J Mol Biol. 1992 Mar. 20; 224(2): 487-499).

[0162] “Heavy chain” in one embodiment of the present invention is typically the main constituent element of a full-length antibody. A heavy chain is generally bound to a light chain by a disulfide bond and non-covalent bond. A region called a variable region (VH) which has an amino acid sequence that is not constant even among antibodies in the same class of the same species, is present in a domain on the N-terminus side of a heavy chain. VH is generally known to greatly contribute to the specificity and affinity to an antigen. For example, “Reiter et al., J Mol Biol. 1999 Jul. 16; 290(3): 685-98.” describes that a molecule with only a VH, when made, bound to an antigen with specificity and high level of affinity. Furthermore, “Wolfson W, Chem Biol. 2006 December; 13 (12): 1243-1244.” describes that there are antibodies having only a heavy chain without a light chain among camel antibodies.

[0163] “CDR (complementarity determining region)” in one embodiment of the present invention is a region that is in actual contact with an antigen to form a binding site in an antibody. CDRs are generally located on an Fv (variable region: including heavy chain variable region (VH) and light chain variable region (VL)) of an antibody. Further, CDRs generally have CDR1, CDR2, and CDR3 consisting of about 5-30 amino acid residues. In addition, CDRs of a heavy chain are particularly known for their contribution to binding of an antibody to an antigen. Among the CDRs, CDR3 is known to contribute the most in binding of an antibody to an antigen. For example, “Willy et al., Biochemical and Biophysical Research Communications Volume 356, Issue 1, 27 Apr. 2007, Pages 124-128” describes that a heavy chain CDR3 was altered to elevate the binding capability of an antibody. An Fv region other than the CDRs is called a framework region (FR), consisting of FR1, FR2, FR3, and FR4, which are conserved relatively well among antibodies (Kabatet al., “Sequence of Proteins of Immunological Interest” US Dept. Health and Human Services, 1983.) Specifically, a factor characterizing the reactivity of an antibody is considered to be in CDRs, especially heavy chain CDRs.

[0164] A plurality of methods for defining CDRs and determining the positions thereof have been reported. For example, the Kabat definition (Sequences of Proteins of Immunological Interest, 5th ed., Public Health Service, National Institutes of Health, Bethesda, Md. (1991)) or the Chothia definition (Chothia et al., J. Mol. Biol., 1987; 196: 901-917) may be used. One embodiment of the present invention uses the Kabat definition as an optimal example, but the definition is not necessarily limited thereto. Further, the definitions may be determined in some cases after considering both the Kabat definition and the Chonthia definition. For example, an overlapping portion of CDR according to each of the definitions, or a portion comprising both CDRs according to each of the definitions can be deemed the CDR. A specific example of such a method is the method of Martin et al using Oxford Molecular's AbM antibody modeling software, which is a proposal combining the Kabat definition and the Chonthia definition (Proc. Natl. Acad. Sci. USA, 1989; 86: 9268-9272). Such CDR information can be used to produce a mutant that can be used in the present invention. Such an antibody mutant comprises one or several (e.g., 2, 3, 4, 5, 6, 7, 8, 9, and 10) substitutions, additions, or deletions in the framework of the original antibody. However, a mutant can be produced such that the CDR does not comprise a mutation.

[0165] As used herein, “antigen” refers to any substrate that can be specifically bound by an antibody molecule. As used herein, “immunogen” refers to an antigen that can initiate lymphocyte activation which leads to an antigen specific immune response. As used herein, “epitope” or “antigen determinant” refers to a site in an antigen molecule to which an antibody or a lymphocyte receptor binds. A method of determining an epitope is well known in the art. Such an epitope can be determined by those skilled in the art by using a well-known and conventional technique when a primary sequence of an amino acid or a nucleic acid is provided. It is understood that the antibody of the present invention can be similarly used even for antibodies having other sequences, as long as the epitope is the same.

[0166] It is understood that antibodies with any specificity may be used as the antibody used herein, as long as false positive reactions are reduced. Thus, the antibodies used in the present invention may be a polyclonal antibody or a monoclonal antibody.

[0167] As used herein, “means” refers to anything that can be a tool for accomplishing an objective (e.g., detection, diagnosis, therapy). As used herein, “selective recognizing means” in particular refers to means capable of recognizing a certain subject differently from others.

[0168] As used herein, “marker (substance, protein or gene)” refers to a substance that can be an indicator for tracking whether a target is in or at risk of being in a certain condition (e.g., diseased state, disorder state, level of or presence of malignant state or the like). Examples of such a marker include genes, gene products, metabolites, enzymes and the like. In the present invention, detection, diagnosis, prognosis, poor prognosis, diagnosis of poor prognosis, diagnosis of prognostic state, preliminary detection, prediction, or prediagnosis of a certain state (e.g., state of a disease such as cancer) can be materialized by using an agent or means specific to a marker associated with such a state, or a composition, kit or system comprising the same or the like. As used herein, “expression product” (also referred to as a gene product) refers to a protein or mRNA encoded by a gene. It is found in the present specification that a gene product (LSR), which does not exhibit association with malignant tumor, especially to therapy thereof, can be used as an indicator for ovarian cancer.

[0169] “Malignant tumor” as used herein includes, for example, tumor that develops from a mutation of normal cells. Malignant tumor can develop from any organ or tissue of the entire body. Such malignant tumor comprises one or more type selected from the group consisting of lung cancer, esophageal cancer, gastric cancer, liver cancer, pancreatic cancer, renal cancer, adrenal cancer, bile duct cancer, breast cancer, colon cancer, small intestine cancer, ovarian cancer, uterine cancer, bladder cancer, prostate cancer, ureteral cancer, renal pelvis cancer, ureteral cancer, penile cancer, testicular cancer, cerebral tumor, cancer of the central nervous system, cancer of the peripheral nervous system, head and neck cancer, glioma, glioblastoma multiform, skin cancer, melanoma, thyroid cancer, salivary gland cancer, malignant lymphoma, carcinoma, sarcoma, and hematologic malignancy. Ovarian cancer in this regard includes, for example, ovarian serous adenocarcinoma and ovarian clear cell adenocarcinoma. Uterine cancer includes, for example, endometrial cancer and cervical cancer. Head and neck cancer includes, for example, or al cavity cancer, pharyngeal cancer, nasal cavity cancer, paranasal cancer, salivary gland cancer, and thyroid cancer. Lung cancer includes, for example, non-small-cell lung cancer and small cell lung cancer. Further, malignant tumor may be LSR positive.

[0170] Among malignant tumor, serous adenocarcinoma is cancer that progresses very rapidly. It is difficult to completely eliminate the cancer even with commercially available anticancer agents. Furthermore, in recurrences, commercially available anticancer agents hardly have any effect thereon. Further, hardly any therapeutic effect can be expected on clear cell adenocarcinoma by commercially available anticancer agents. Meanwhile, the anti-LSR antibody according to the embodiment of the present invention can be a novel therapeutic drug for serous adenocarcinoma and clear cell adenocarcinoma.

[0171] “LSR positive malignant tumor” in one embodiment of the present invention includes malignant tumor that significantly expresses or overexpresses LSRs. Whether malignant tumor is LSR positive may be assessed, for example, by RT-PCR, Western blot, or immunohistochemically staining method. Further, when total protein of malignant tumor cells is subjected to Western blot and a band corresponding to LSRs (e.g., band near 649aa) can be observed by visual inspection, the malignant tumor may be determined as LSR positive. Further, when the amount of LSR expression of malignant tumor cells from a patient is significantly more than for normal cells, the malignant tumor may be determined as LSR positive. It is preferable that an anti-LSR antibody is used to inspect LSR expression from the viewpoint of materializing a more optimal dosing by accurately diagnosing malignant tumor as LSR positive.

[0172] As used herein, “subject (person)” refers to a target subjected to diagnosis, detection, therapy or the like of the present invention (e.g., an organism such as a human or a cell, blood, serum or the like extracted from an organism).

[0173] As used herein, “sample” refers to any substance obtained from a subject or the like. For example, serum and the like are encompassed thereby. Those skilled in the art can appropriately select a preferred sample based on the descriptions herein.

[0174] As used herein, “agent” is used broadly and may be any substance or other elements (e.g., energy, radiation, heat, electricity and other forms of energy) as long as the intended objective can be achieved. Examples of such a substance include, but are not limited to, protein, polypeptide, oligopeptide, peptide, polynucleotide, oligonucleotide, nucleotide, nucleic acid (including, for example, DNAs such as cDNA and genomic DNA and RNAs such as mRNA), polysaccharide, oligosaccharide, lipid, organic small molecule (e.g., hormone, ligand, information transmitting substance, organic small molecule, molecule synthesized by combinatorial chemistry, small molecule that can be used as medicine (e.g., small molecule ligand and the like)) and a complex molecule thereof. Typical examples of an agent specific to a polynucleotide include, but are not limited to, a polynucleotide having complementarity with a certain sequence homology (e.g., 70% or greater sequence identity) to a sequence of the polynucleotide, polypeptide such as a transcription factor that binds to a promoter region and the like. Typical examples of an agent specific to a polypeptide include, but are not limited to, an antibody directed specifically to the polypeptide or a derivative or analog thereof (e.g., single stranded antibody), a specific ligand or receptor when the polypeptide is a receptor or ligand, a substrate when the polypeptide is an enzyme and the like.

[0175] As used herein, “diagnosis” refers to identifying various parameters associated with a disease, disorder, condition (e.g., malignant tumor) or the like in a subject to determine the current or future state of such a disease, disorder, or condition. The condition in the body can be investigated by using the method, apparatus, or system of the present invention. Such information can be used to select and determine various parameters of a formulation or method for the treatment or prevention to be administered, disease, disorder, or condition in a subject or the like. As used herein, “diagnosis” when narrowly defined refers to diagnosis of the current state, but when broadly defined includes “early diagnosis”, “predictive diagnosis”, “prediagnosis” and the like. Since the diagnostic method of the present invention in principle can utilize what comes out from a body and can be conducted away from a medical practitioner such as a physician, the present invention is industrially useful. In order to clarify that the method can be conducted away from a medical practitioner such as a physician, the term as used herein may be particularly called “assisting” “predictive diagnosis, prediagnosis or diagnosis”.

[0176] The term “prognosis” as used herein refers to prediction of the possibility of progression or death due to cancer, such as the possibility of recurrence, metastasis and diffusion, drug resistance and the like of a neoplastic disease such as malignant tumor (e.g., ovarian cancer). Thus, as used herein, “excellent prognostic state” refers to a state where recurrence of primary cancer is not observed beyond a certain period of time (e.g., 4 years) after removal of the cancer tissue, and “poor prognostic state” or “poor prognosis” refers to a state where recurrence of primary cancer is observed beyond a certain period of time (e.g., 4 years) after removal of the cancer tissue. A prognostic agent is a variable related to natural course of malignant tumor, which affects the rate of recurrence of outcome of a patient who has experienced malignant tumor. Examples of clinical indicator associated with exacerbation in prognosis include lymph node metastasis and highly malignant tumor. A prognostic agent is often used to classify patients into subgroups with different fundamental risks of recurrence. In this manner, expression of LSRs of the present invention can be used as a prognostic agent. The term “prediction” as used herein refers to the possibility of a patient having a specific clinical outcome, regardless of good or bad, after extraction of primary tumor. Thus, LSRs of the present invention can be used as a poor prognosis marker. A therapeutic method can be determined by clinically using the prediction method of the present invention to select the optimal therapeutic method for a specific patient. The prediction method of the present invention would be a beneficial means for prediction if there is a possibility that a patient would have a positive reaction to a therapeutic regimen, e.g., surgical intervention or the like. A prognostic agent can be included in the prediction.

[0177] As used herein, “detecting drug (agent)” or “inspection drug (agent)” broadly refers to all agents capable of detecting or inspecting a target of interest.

[0178] As used herein, “diagnostic drug (agent)” broadly refers to all agents capable of diagnosing a condition of interest (e.g., disease such as malignant tumor or the like).

[0179] As used herein, “therapy” refers to the prevention of exacerbation, preferably maintaining of the current condition, more preferably alleviation, and still more preferably disappearance of a disease or disorder (e.g., malignant tumor) in case of such a condition, including being capable of exerting a prophylactic effect or an effect of improving a disease of a patient or one or more symptoms accompanying the disease. Preliminary diagnosis with suitable therapy may be referred to as “companion therapy” and a diagnostic agent therefor may be referred to as “companion diagnostic agent”.

[0180] As used herein, “therapeutic drug (agent)” broadly refers to all agents capable of treating a condition of interest (e.g., diseases such as malignant tumor or the like). In one embodiment of the present invention, “therapeutic drug” may be a pharmaceutical composition comprising an effective ingredient and one or more pharmacologically acceptable carriers. A pharmaceutical composition can be manufactured, for example, by mixing an effective ingredient and the above-described carriers by any method known in the technical field of pharmaceuticals. Further, mode of usage of a therapeutic drug is not limited, as long as it is used for therapy. A therapeutic drug may be an effective ingredient alone or a mixture of an effective ingredient and any ingredient. Further, the shape of the above-described carriers is not particularly limited. For example, the carrier may be a solid or liquid (e.g., buffer solution). It should be noted that a therapeutic drug of malignant tumor includes a drug (prophylactic drug) for preventing malignant tumor or a growth suppressant for malignant tumor cells.

[0181] As used herein, “prevention” refers to the action of taking a measure against a disease or disorder (e.g., malignant tumor) from being in such a condition prior to being in such a condition. For example, it is possible to use the agent of the present invention to perform diagnosis, and optionally use the agent of the present invention to prevent or take measures to prevent malignant tumor or the like.

[0182] As used herein, “prophylactic drug (agent)” broadly refers to all agents capable of preventing a condition of interest (e.g., diseases such as malignant tumor or the like).

[0183] As used herein, “interaction” refers, for two substances, to applying a force (e.g., intermolecular force (Van der Waals force), hydrogen bond, hydrophobic interaction, or the like) between one substance and the other substance. Generally, two substances that have interacted are in a conjugated or bound state. The detection, inspection, and diagnosis in the present invention can be materialized by utilizing such interaction.

[0184] As used herein, the term “bond” refers to a physical or chemical interaction between two substances or between combinations thereof. A bond includes an ionic bond, non-ionic bond, hydrogen bond, Van der Waals bond, hydrophobic interaction and the like. A physical interaction (bond) may be direct or indirect. Indirect physical interaction (bond) is mediated by or is due to an effect of another protein or compound. A direct bond refers to an interaction, which does not occur through or due to an effect of another protein or compound and does not substantially involve another intermediate.

[0185] Thus, an “agent” (or detection agent or the like) that “specifically” interacts (or binds) to a biological agent such as a polynucleotide or a polypeptide as used herein encompasses agents with affinity to the biological agent such as a polynucleotide or polypeptide that is typically similar or higher, preferably significantly (e.g., statistically significantly) higher, than affinity to other unrelated polynucleotides or polypeptides (especially those with less than 30% identity). Such affinity can be measured, for example, by hybridization assay, binding assay or the like.

[0186] As used herein, “specific” interaction (or bond) of a first substance or agent with a second substance or agent refers to the first substance or agent interacting with (or binding to) the second substance or agent at a higher level of affinity than to substances or agents other than the second substance or agent (especially other substances or agents in a sample comprising the second substance or agent). Examples of an interaction (or bond) specific to a substance or agent include, but are not limited to, hybridization in a nucleic acid, antigen-antibody reaction in a protein, enzyme-substrate reaction, other nucleic acid protein reactions, protein-lipid interaction, nucleic acid-lipid interaction and the like. Thus, when substances or agents are both nucleic acids, a first substance or agent “specifically interacting” with a second substance or agent encompasses the first substance or agent having at least partial complementarity to the second substance or agent. Further, examples of a first substance or agent“specifically” interacting with (or binding to) a second substance or agent when substances or agents are both proteins include, but are not limited to, interaction by an antigen-antibody reaction, interaction by a receptor-ligand reaction, enzyme-substrate interaction and the like. When two types of substances or agents include a protein and a nucleic acid, a first substance or agent “specifically” interacting with (or binding to) a second substance or factor encompasses an interaction (or a bond) between an antibody and an antigen. Such a specific interactive or binding reaction can be utilized to detect or quantify a target in a sample.

[0187] As used herein, “detection” or “quantification” of polynucleotide or polypeptide expression can be accomplished by using a suitable method including, for example, an immunological measuring method and measurement of mRNAs, including a bond or interaction to a detection agent, inspection agent or diagnostic agent. Examples of a molecular biological measuring method include northern blot, dot blot, PCR and the like. Examples of an immunological measurement method include ELISA using a microtiter plate, RIA, fluorescent antibody method, luminescence immunoassay (LIA), immunoprecipitation (IP), single radial immunodiffusion (SRID), turbidimetric immunoassay (TIA), western blot, immunohistochemical staining and the like. Further, examples of a quantification method include ELISA, RIA and the like. Quantification may also be performed by a gene analysis method using an array (e.g., DNA array, protein array). DNA arrays are outlined extensively in (Ed. by Shujunsha, Saibo Kogaku Bessatsu “DNA Maikuroarei to Saishin PCR ho” [Cellular engineering, Extra issue, “DNA Microarrays and Latest PCR Methods”]. Protein arrays are discussed in detail in Nat Genet. 2002 December; 32 Suppl: 526-32. Examples of a method of analyzing gene expression include, but are not limited to, RT-PCR, RACE, SSCP, immunoprecipitation, two-hybrid system, in vitro translation and the like, in addition to the methods discussed above. Such additional analysis methods are described in, for example, Genomu Kaiseki Jikkenho Nakamura Yusuke Labo Manyuaru [Genome analysis experimental method Yusuke Nakamura Lab Manual], Ed. by Yusuke Nakamura, Yodosha (2002) and the like. The entirety of the descriptions therein is incorporated herein by reference.

[0188] As used herein, “amount of expression” refers to the amount of polypeptide, mRNA or the like expressed in a cell, tissue or the like of interest. Examples of such an amount of expression include amount of expression of the polypeptide of the present invention at a protein level assessed by any suitable method including an immunological measurement method such as ELISA, RIA, fluorescent antibody method, western blot, and immunohistochemical staining by using the antibody of the present invention, and the amount of expression of the polypeptide used in the present invention at an mRNA level assessed by any suitable method including a molecular biological measuring method such as northern blot, dot blot, and PCR. “Change in amount of expression” refers to an increase or decrease in the amount of expression of the polypeptide used in the present invention at a protein level or mRNA level assessed by any suitable method including the above-described immunological measuring method or molecular biological measuring method. A variety of detection or diagnosis based on a marker can be performed by measuring the amount of expression of a certain marker.

[0189] As used herein, “decrease” or “suppression” of activity or expression product (e.g., protein, transcript (RNA or the like)) or synonyms thereof refers to: a decrease in the amount, quality or effect of a specific activity, transcript or protein; or activity that decreases the same. Among decrease, “elimination” refers to activity, expression product or the like being less than the detection limit and especially referred to as “elimination”. As used herein, “elimination” is encompassed by “decrease” or “suppression”.

[0190] As used herein, “increase” or “activation” of activity or expression product (e.g., protein, transcript (RNA or the like)) or synonyms thereof refers to: an increase in the amount, quality or effect of a specific activity, transcript or protein; or activity that increases the same.

[0191] As used herein, “(nucleic acid) primer” refers to a substance required for initiating a reaction of a polymeric compound to be synthesized in a polymer synthesizing enzyme reaction. A synthetic reaction of a nucleic acid molecule can use a nucleic acid molecule (e.g., DNA, RNA or the like) complementary to a portion of a sequence of a polymeric compound to be synthesized.

[0192] A primer can be used herein as a marker detecting means.

[0193] As used herein, “probe” refers to a substance that can be means for search, which is used in a biological experiment such as in vitro and/or in vivo screening. Examples thereof include, but are not limited to, a nucleic acid molecule comprising a specific base sequence, a peptide comprising a specific amino acid sequence, a specific antibody, a fragment thereof and the like. As used herein, a probe is used as means for marker detection, inspection, or diagnosis.

[0194] As used herein, “label” refers to an entity (e.g., substance, energy, electromagnetic wave or the like) for distinguishing a molecule or substance of interest from others. Such a method of labeling includes RI (radioisotope) method, fluorescence method, biotin method, chemiluminescent method and the like. When a plurality of markers of the present invention or agents or means for capturing the same are labeled by a fluorescence method, labeling is performed with fluorescent substances having different fluorescent emission maximum wavelengths. It is preferable that the difference in fluorescent emission maximum wavelengths is 10 nm or greater. When labeling a ligand, any label that does not affect the function can be used. However, Alexa™Fluor is desirable as a fluorescent substance. Alexa™Fluor is a water-soluble fluorescent dye obtained by modifying coumarin, rhodamine, fluorescein, cyanine or the like. This is a series compatible with a wide range of fluorescence wavelengths. Relative to other fluorescent dyes for the corresponding wavelength, Alexa™Fluor is very stable, bright and has a low level of pH sensitivity. Combinations of fluorescent dyes with fluorescence maximum wavelength of 10 nm or greater include a combination of Alexa™555 and Alexa™633, combination of Alexa™488 and Alexa™555 and the like. When a nucleic acid is labeled, any label can be used that can bind to abase portion thereof. However, it is preferable to use a cyanine dye (e.g., Cy3, Cy5 or the like of the CyDye™ series), rhodamine 6G reagent, 2-acetylaminofluorene (AAF), AAIF (iodine derivative of AAF) or the like. Examples of a fluorescent substance with a difference in fluorescent emission maximum wavelengths of 10 nm or greater include a combination of Cy5 and a rhodamine 6G reagent, a combination of Cy3 and fluorescein, a combination of a rhodamine 6G reagent and fluorescein and the like. The present invention can utilize such a label to alter a subject of interest to be detectable by the detecting means to be used. Such alteration is known in the art. Those skilled in the art can appropriately carryout such a method in accordance with the label and subject of interest.

[0195] As used herein, “tag” refers to a substance for distinguishing a molecule by a specific recognition mechanism such as receptor-ligand, or more specifically, a substance serving the role of a binding partner for binding a specific substance (e.g., having a relationship such as biotin-avidin or biotin-streptavidin). A tag can be encompassed in the scope of “label”. Accordingly, a specific substance to which a tag is bound can distinguish the specific substance by a contact with a substrate, to which a binding partner of a tag sequence is bound. Such a tag or label is well known in the art. Typical tag sequences include, but are not limited to, myc tag, His tag, HA, Avi tag and the like. Such a tag may be bound to the marker of the present invention or a detection agent, inspection agent, or diagnostic agent (may be a primer, probe or the like) of the marker.

[0196] As used herein, “in vivo” refers to inside of a living body. In specific context, “in a living body” refers to the position where a substance of interest should be disposed.

[0197] As used herein, “in vitro” refers to a state where a portion of a living body is extracted or freed “outside of a living body” (e.g., in a test tube) for various research purposes. This is a term that is an antonym of in vivo.

[0198] As used herein, when a procedure is performed outside of the body, but the subject of the procedure is intended to be subsequently returned in the body, the series of operations is referred to as “ex vivo”. An embodiment that treats a cell in a living body with an agent of the present invention and returns the cell in a patient is also anticipated in the present invention.

[0199] As used herein, “kit” refers to a unit generally providing portions to be provided (e.g., inspection drug, diagnostic drug, therapeutic drug, antibody, label, manual and the like) into two or more separate sections. This form of a kit is preferred when a composition that should not be provided in a mixed state and is preferably mixed immediately before use for safety or the like is intended to be provided. Such a kit advantageously comprises an instruction or manual describing how the provided portions (e.g., inspection drug, diagnostic drug, or therapeutic drug) are used or how a reagent should be handled. When the kit is used herein as a reagent kit, the kit generally comprises an instruction describing how to use an inspection drug, diagnostic drug, therapeutic drug, antibody and the like.

[0200] As used herein, “instruction” is a document with an explanation of the method of use of the present invention for a physician or other users. The instruction has a description of the detection method of the present invention, method of use of a diagnostic agent, or administration of a medicament or the like. Further, an instruction may have a description instructing or al administration or administration to the esophagus (e.g., by injection or the like) as a site of administration. The instruction is prepared in accordance with a format defined by the regulatory agency of the country in which the present invention is practiced (e.g., the Ministry of Health, Labor and Welfare in Japan, Food and Drug Administration (FDA) in the U.S. or the like), with an explicit description showing approval by the regulatory agency. The instruction is a so-called package insert and is typically provided in, but not limited to, paper media. The instructions may also be provided in a form such as electronic media (e.g., web sites provided on the Internet or emails).

### Preferred Embodiments

[0201] Preferred embodiments of the present invention are described hereinafter. The embodiments are provided hereinafter for better understanding of the present invention. It is understood that the scope of the present invention should not be limited to the following descriptions. Thus, it is apparent that those skilled in the art can readily make modifications within the scope of the present invention while referring to the descriptions herein. It is understood that the following embodiments of the present invention can be used alone or in combine.

[0202] (Therapy and Prevention of Malignant Tumor)

[0203] In one aspect, the present invention provides a novel therapeutic or prophylactic drug for malignant tumor. The therapeutic or prophylactic drug is a therapeutic or prophylactic drug for malignant tumor, comprising an LSR suppressant (e.g., anti-LSR antibody). LSR positive malignant tumor can be treated or prevented by using such a therapeutic or prophylactic agent. Since such a therapeutic or prophylactic drug uses antibodies, it is an excellent drug from the viewpoint of safety.

[0204] There are LSR positive and LSR non-positive patients or patients who may be in such a group in malignant tumor patients or patients who may be in such a group. For this reason, it is preferable that the therapeutic drug of the present invention is administered to a patient among the malignant tumor patients who is determined to have malignant tumor that is LSR positive malignant tumor. In this manner, a drug can be administered more optimally by diagnosing in advance the presence of LSR positive.

[0205] In one specific embodiment, the composition or medicament (therapeutic drug, prophylactic drug or the like) of the present invention is formulated in anticipation of implementation in administration to a patient determined to have an episode of LSR positive malignant tumor.

[0206] In one embodiment, the LSR suppressant used in the present invention is an antibody, a fragment or a functional equivalent thereof, or a nucleic acid.

[0207] In a specific embodiment, the LSR suppressant used in the present invention preferably has the ability to inhibit exacerbation due to VLDL. In a more specific embodiment, the LSR antibody of the present invention is an antibody having the ability to inhibit exacerbation due to VLDL. Although not wishing to be bound by any theory, LSRs affect cancer growth by incorporating VLDL and enhancing lipid metabolism. That is, it is understood that suppression of LSR functions in cancer cells expressing LSRs results in enhanced suppression of cancer cell growth. The antibodies of the present invention can suppress VLDL incorporation into LSRs of cancer cells to enhance suppression of cancer cell growth. Thus, target cancer or cancer cells of the present invention may be cancer or cells associated with VLDL (e.g., cancer shown in the Examples or cancer associated with cancer cells, ovarian cancer or the like). In a specific embodiment, the LSR suppressant used in the present invention is a nucleic acid, which is an antisense nucleic acid, siRNA or the like. Specifically, the siRNA may comprise SEQ ID NO: 9-14 or the like.

[0208] In another embodiment, the LSR suppressantis an antibody or a fragment or a functional equivalent thereof. The antibody of the present invention may be a specific sequence described in other parts of the present specification. The antibody may be an antibody or antigen binding fragment thereof comprising any sequence comprising CDRs of the full length sequence, or an antibody or antigen binding fragment thereof comprising a variable region of the following sequence, the framework region thereof comprising 1, 2, 3, 4, 5, 6, 7, 8, 9, 10, 12, 15, 17, 20 or more substitutions, additions, or deletions. The antibody can be manufactured by using an embodiment described in other parts of the specification and/or an approach known in the art. For therapy or prevention of the present invention, it is preferable that such an antibody or a fragment or functional equivalent thereof has activity to suppress LSRs or downstream information transmitting pathway thereof. Such activity may be confirmed by observing the amount of expression or activity of LSRs, or by directly using malignant tumor cell strains such as ovarian clear cell adenocarcinoma to observe inhibition of cell growth, cytotoxic activity with antibody-dependent cell-mediated cytotoxicity (ADCC), tumor regression after transplantation into model animals or the like. Such approaches are well known in the art, while the approach used herein may also be used.

[0209] In another aspect, the present invention provides a method of preventing or treating malignant tumor of a subject, comprising administering an effective amount of LSR suppressant to the subject in need thereof. It is understood that any form described in other parts of the present specification can be used as the LSR suppressant used in the prophylactic or therapeutic method of the present invention.

[0210] In another aspect, the present invention also provides a composition or a medicament (therapeutic drug or prophylactic drug) for preventing or treating malignant tumor, comprising an LSR binding agent. In a preferred embodiment, the composition or medicament (therapeutic drug, prophylactic drug or the like) further comprises a cell-killing agent. Thus, such a composition or medicament (therapeutic drug, prophylactic drug or the like) may include a complex molecule.

[0211] In a specific embodiment, the LSR binding agent is an antibody, a fragment or a functional equivalent thereof, or a nucleic acid. In a preferred embodiment, the LSR binding agent is an antibody or a fragment or a functional equivalent thereof, further bound to a cell-killing agent.

[0212] As used herein, “cell-killing agent” is an agent that may dissolve a cell membrane. When the agent is a peptide, the cell killing agent is called a cytotoxic peptide. Cytotoxic peptide has various nomenclatures in the art. For example, “soluble peptidic component” and “cell-killing sequence” are also called “cytolic peptide (sequence)”, “cell dissolving peptide (sequence)” or the like. However, they are used synonymously in the content of the present invention. Representative examples of such a cytotoxic agent include those listed in Gail D. et al., Cancer Res 2008; 68: 9280-9290.; Ian Krop and Eric P. Winer, Clin Cancer Res; 20(1); 1-6. and K Naito et al., Leukemia (2000) 14, 1436-144, as well as, but not limited to, maytansinoid, emtansine, N-acetyl-γ calicheamicin dimethyl hydrazide (NAc-γ calicheamicin, DMH) comprised in CMA-676 and the like. Representative cell killing peptide includes, but is not limited to, cell membrane dissolving peptide, cell membrane potential destabilizing peptide, cell membrane dissolving/nucleic acid binding peptide, and mitochondrial membrane disintegrating peptide.

[0213] Such a cell-killing agent may be bound to the binding agent of the present invention such as an antibody with a spacer as needed. As used herein, “spacer” refers to a moiety that forms a chemical bond between molecules of chain-like polymers so as to bridge the molecules. Such a spacer is also called a linker. Representative spacers of a peptide include, but are not limited to, a sequence of 0-5 amino acids consisting of G and P. A spacer is not essential and may not be present.

[0214] A combination of the binding agent of the present invention and cell-killing agent can also be considered a complex molecule. An example is provided to explain such a molecule. Such a molecule can be explained as a molecule made by combining a cytotoxic portion corresponding to the explosive charge portion and a portion responsible for specificity to a cancer cell corresponding to the warhead portion (e.g., peptide/sequence that specifically binds to a receptor which is highly expressed in cancer cells, typically an antibody). When a spacer is used, the molecule would be comprised of a cancer cell specific binding agent+spacer+cell-killing agent. Any cancer specific binding agent, any spacer, and any cell-killing agent can be combined herein in any manner. Examples of a manufacturing method and usage method thereof are described. Such a molecule is generally made by a chemical synthesis method, but when such a molecule is comprised of peptides, a method of forced expression and purification by genetic engineering or a method combining such a method can also be used.

[0215] For use of the present invention, LSR expression on the cell surface and sensitivity to damage of cancer cells to cell-killing agent are investigated for cancer cells to be subjected to therapy. Warhead and explosive charge are selected base on the result thereof to design an optimal molecule for the cancer cell. A custom-made peptide toxin obtained from chemical synthesis or the like can be combined as needed with DDS such as atelocollagen and administered locally or systemically for therapy.

[0216] In one embodiment, an LSR binding agent is an antibody or a fragment or a functional equivalent thereof. The antibody can be a sequence specifically listed in other parts of the present specification.

[0217] It is preferable that an administration pathway of a therapeutic drug that is effective in therapy is used. For example, the administration pathway may be intravenous, subcutaneous, intramuscular, intraperitoneal, or al administration or the like. The mode of administration may be, for example, injection, capsule, tablet, granule or the like. When an antibody or polynucleotide is administered, use thereof as an injection is effective. An aqueous solution for injection may be stored, for example, in a vial or a stainless streel container. Further, an aqueous solution for injection may contain, for example, saline, saccharide (e.g., trehalose), NaCl, NaOH or the like. Further, a therapeutic drug may contain a buffer (e.g., phosphate buffer), stabilizer or the like.

[0218] The composition, medicament, therapeutic agent, prophylactic agent and the like of the present invention generally comprise a therapeutically effective amount of therapeutic agent or effective ingredient and a pharmaceutically acceptable carrier or excipient. As used herein, “pharmaceutically acceptable” means that government regulatory agency-approved or pharmacopoeia or other commonly recognized pharmacopoeia-listed for use in animals and more specifically in humans. As used herein “carrier” refers to a diluent, adjuvant, excipient or vehicle administered in conjunction with a therapeutic agent. Such a carrier can be an aseptic liquid such as water or oil, including but not limited to liquids derived from petroleum, animal, plant or synthesis, as well as peanut oil, soybean oil, mineral oil, sesame oil and the like. When a medicament is or ally administered, water is a preferred carrier. For intravenous administration of a pharmaceutical composition, saline and aqueous dextrose are preferred carriers. Preferably, aqueous saline solution and aqueous dextrose and glycerol solution are used as a liquid carrier of an injectable solution. Suitable excipients include light anhydrous silicic acid, crystalline cellulose, mannitol, starch, glucose, lactose, sucrose, gelatin, malt, rice, wheat flour, chalk, silica gel, sodium stearate, glyceryl monostearate, talc, sodium chloride, powdered skim milk, glycerol, propylene, glycol, water, ethanol, carmellose calcium, carmellose sodium, hydroxypropyl cellulose, hydroxypropyl methylcellulose, polyvinyl acetal diethylamino acetate, polyvinylpyrrolidone, gelatin, medium-chain fatty acid triglyceride, polyoxyethylene hydrogenated castor oil 60, saccharose, carboxymethylcellulose, corn starch, inorganic salt and the like. When desired, the composition can contain a small amount of wetting agent or emulsifier or pH buffer. These compositions can be in a form of solution, suspension, emulsion, tablet, pill, capsule, powder, sustained release mixture or the like. It is also possible to use traditional binding agents and carriers, such as tryglyceride, to prepare a composition as a suppository. Oral preparation can also comprise a standard carrier such as medicine grade mannitol, lactose, starch, magnesium stearate, sodium saccharin, cellulose, or magnesium carbonate. Examples of a suitable carrier are described in E. W. Martin, Remington's Pharmaceutical Sciences (Mark Publishing Company, Easton, U.S.A). Such a composition contains a therapeutically effective amount of therapy agent and preferably in a purified form, together with a suitable amount of carrier, such that the composition is provided in a form suitable for administration to a patient. A preparation must be suitable for the administration format. In addition, the composition may comprise, for example, a surfactant, excipient, coloring agent, flavoring agent, preservative, stabilizer, buffer, suspension, isotonizing agent, binding agent, disintegrant, lubricant, fluidity improving agent, corrigent or the like.

[0219] When the present invention is administered as a medicament, various delivery systems are known, and such systems can be used to administer a therapeutic agent of the present invention to a suitable site (e.g., esophagus). Such a system, for example, can use a recombinant cell that can express encapsulated therapeutic agent (e.g., polypeptide) in liposomes, microparticles and microcapsules or use of endocytosis mediated by a receptor; construction of a therapy nucleic acid as a part of a retrovirus vector or other vector or the like. The method of introduction includes, but not limited to, intradermal, intramuscular, intraperitoneal, intravenous, subcutaneous, intranasal, epidural and or al pathways. A medicament can be administered by any suitable pathway, such as by injection, bolus injection, or by absorption through epithelial or mucocutaneous lining (e.g., or al cavity, rectum, intestinal mucosa or the like). In addition, an inhaler or mistifier using an aerosolizing agent can be used as needed. Moreover, other biological activating agents can also be administered together. Administration can be systemic or local. When the present invention is used in an ovarian region, a medicament may be administered through any suitable pathway such as direct injection into an affected site of an ovary or the like.

[0220] In a specific embodiment where a therapeutic agent is a nucleic acid, the nucleic acid can be constructed as a part of a suitable nucleic acid expression vector and administered in vivo to be present in a cell to promote expression of an encoded protein. This can be implemented, for example, by using a retrovirus vector, direct injection, use of a microparticle gun, coating the nucleic acid with lipid, cell surface receptor or transfection agent, or administering a nucleic acid linked to a tag sequence known to enter the nucleus. Alternatively, a nucleic acid therapeutic agent can be introduced in a cell such that it is incorporated into a host cell DNA by homologous recombination for expression.

[0221] In a preferred embodiment, a composition can be prepared as a pharmaceutical composition adapted to administration to humans in accordance with a known method. Such a composition can be administered by an injection. A composition for injection is typically a solution in an aseptic isotonic aqueous buffer. A composition can also comprise a local anesthetic such as lidocaine which alleviates the pain at the site of injection and a solubilizing agent as needed. Generally, ingredients can be supplied separately or by mixing the ingredients together in a unit dosing form and supplied, for example, in a sealed container such as an ampoule or sachet showing the amount of active agent or as a lyophilized powder or water-free concentrate. When a composition is to be administered by injection, the composition can be distributed by using an injection bottle containing aseptic agent-grade water or saline. When a composition is to be administered by injection, an aseptic water or saline ampoule for injection can also be provided such that the ingredients can be mixed prior to administration.

[0222] The composition, medicament, therapeutic agent, and prophylactic agent of the present invention can be prepared as a neutral or salt form or other prodrugs (e.g., ester or the like). Pharmaceutically acceptable salts include salts formed with a free carboxyl group, derived from hydrochloric acid, phosphoric acid, acetic acid, oxalic acid, tartaric acid or the like, salts formed with a free amine group, derived from isopropylamine, trimethylamine, 2-ethylaminoethanol, histidine, procaine or the like, and salts derived from sodium, potassium, ammonium, calcium, or ferric hydroxide or the like.

[0223] The amount of therapeutic agent of the present invention that is effective in therapy of a specific disorder or condition may vary depending on the properties of the disorder or condition. However, such an amount can be determined by those skilled in the art by a standard clinical technique based on the descriptions herein. Furthermore, an in vitro assay can be used in some cases to assist the identification of the optimal dosing range. The precise dose to be used in a preparation may also vary depending on the administration pathway or the severity of the disease or disorder. Thus, the dose should be determined in accordance with the judgment of the attending physician or the condition of each patient. The dosage is not particularly limited, but may be 0.001, 1, 5, 10, 15, 100 or 1000 mg/kg body weight per dosage or within a range between any two values described above. The dosing interval is not particularly limited, but may be, for example, 1 or 2 administration every 1, 7, 14, 21, or 28 days or 1 or 2 administrations in the range of period between any two values described above. The dosage, dosing interval, and dosing method may be appropriately selected depending on the age, weight, symptom, target organ or the like of the patient. Further, it is preferable that a therapeutic drug contains a therapeutically effective amount, or an amount effective for exerting a desired effect, of effective ingredients. When a malignant tumor marker significantly decreases after administration, the presence of a therapeutic effect may be acknowledged.

[0224] “Patient” in one embodiment of the present invention includes humans and mammals excluding humans (e.g., one or more types of mice, guinea pigs, hamsters, rats, rabbits, pigs, sheep, goats, cows, horses, cats, dogs, marmosets, monkeys and the like). Further, the patient may be a patient determined or diagnosed as having an episode of LSR positive malignant tumor. It is preferable that determination or diagnosis in this regard is performed by detecting the LSR protein level.

[0225] The pharmaceutical composition, therapeutic agent or prophylactic agent of the present invention can be provided as a kit.

[0226] In a specific embodiment, the present invention provides an agent pack or kit comprising one or more containers filled with one or more ingredients of the composition or medicament of the present invention. Optionally, information indicating approval for manufacture, use or sale for administration to a human by a government agency regulating the manufacture, use or sale of medicaments or biological products in a stipulated form can be appended to such a container.

[0227] The kit of the present invention can also contain an expression vector encoding a protein to be used as the composition, therapeutic agent, prophylactic agent or medicament of the present invention. Since such a protein, after expression, forms a biologically active complex, the protein may be reconstituted. Such a kit preferably contains a required buffer and a reagent. Optionally, instruction (package insert) for use of the kit and/or information indicating approval for manufacture, use or sale for administration to a human by a government agency regulating the manufacture, use or sale of medicaments or biological products in a stipulated form can be appended to such a container.

[0228] In a specific embodiment, the pharmaceutical composition comprising a nucleic acid of the present invention can be administered via liposomes, microparticles, or microcapsules. In various embodiments of the present invention, it may be useful to use such a composition to achieve sustained release of the nucleic acid.

[0229] One embodiment of the present invention may be an anti-LSR antibody, which is one or more antibodies selected from the group consisting of (a) an antibody comprising heavy chain CDRs 1, 2, and 3 and light chain CDRs 1, 2, and 3 with amino acid sequences set forth in positions 31-35, 50-66, 99-104, 153-165, 182-188 and 221-230 of SEQ ID NO: 1, respectively, (b) an antibody comprising heavy chain CDRs 1, 2, and 3 and light chain CDRs 1, 2, and 3 with amino acid sequences set forth in positions 31-35, 50-66, 99-103, 152-165, 182-188 and 221-230 of SEQ ID NO: 2, respectively, (c) an antibody comprising heavy chain CDRs 1, 2, and 3 and light chain CDRs 1, 2, and 3 with amino acid sequences set forth in positions 31-35, 50-66, 99-104, 153-165, 182-188 and 221-229 of SEQ ID NO: 3, respectively, (d) an antibody comprising heavy chain CDRs 1, 2, and 3 and light chain CDRs 1, 2, and 3 with amino acid sequences set forth in positions 31-35, 50-66, 99-104, 153-165, 182-188 and 221-229 of SEQ ID NO: 4, respectively, (e) an antibody comprising heavy chain CDRs 1, 2, and 3 and light chain CDRs 1, 2, and 3 with amino acid sequences set forth in positions 31-35, 50-66, 99-104, 153-165, 182-188 and 221-229 of SEQ ID NO: 5, respectively, and (f) an antibody comprising heavy chain CDRs 1, 2, and 3 and light chain CDRs 1, 2, and 3 with amino acid sequences set forth in positions 31-35, 50-66, 99-104, 153-165, 182-188 and 221-229 of SEQ ID NO: 6, respectively, or a mutant of the antibody, which is free of a mutation in the CDRs but comprises one or several substitutions, additions, or deletions in a framework of the antibody in the mutant. Use of such an anti-LSR antibody can effectively suppress especially the growth of LSR-positive malignant tumor cells. Further, LSR-positive malignant tumor can be efficiently diagnosed. Further, another embodiment of the present invention is an anti-LSR antibody comprising at least one of the sets of amino acid sequences of heavy chain CDRs 1, 2, and 3 listed above. These antibodies may be an antibody selected from a monoclonal antibody, polyclonal antibody, chimeric antibody, humanized antibody, human antibody, multifunctional antibody, bispecific or oligospecific antibody, single chain antibody, scFV, diabody, sc(Fv)₂ (single chain (Fv)₂), and scFv-Fc.

[0230] The anti-LSR antibody according to one embodiment of the present invention may comprise a set of amino acid sequences of heavy chain CDRs 1, 2, and 3 and light chain CDRs 1, 2, and 3, and at least one, preferably, 2, 3, 4, 5, 6, 7 or all of the heavy chain FRs 1, 2, 3, and 4 and light chain FRs 1, 2, 3, and 4 are identical, substantially identical, or identical except for a conservative substitution with any one of SEQ ID NOs: 1-6. The anti-LSR antibody may be one or more types of antibodies. Further, another embodiment of the present invention is an anti-LSR antibody comprising at least one of the amino acid sequence set of heavy chain FRs 1, 2, 3, and 4 listed above.

[0231] The anti-LSR antibody according to one embodiment of the present invention may be in a form of scFv. In such a case, a linker between a heavy chain and a light chain may have an amino acid sequence set forth in positions 116-132 of SEQ ID NO: 1, positions 116-132 of SEQ ID NO: 2, positions 116-132 of SEQ ID NO: 3, positions 116-132 of SEQ ID NO: 4, positions 116-132 of SEQ ID NO: 5, or positions 116-132 of SEQ ID NO: 6.

[0232] VHs of #9-7, #16-6, No. 26-2, No. 27-6, No. 1-25, and No. 1-43 described in Example 2 described below are positions 1-115 of SEQ ID NO: 1, positions 1-115 of SEQ ID NO: 2, positions 1-115 of SEQ ID NO: 3, positions 1-115 of SEQ ID NO: 4, positions 1-115 of SEQ ID NO: 5, and positions 1-115 of SEQ ID NO: 6, respectively. Further, VLs of #9-7, #16-6, No. 26-2, No. 27-6, No. 1-25, and No. 1-43 described in Example 2 described below are positions 133-238 of SEQ ID NO: 1, positions 133-239 of SEQ ID NO: 2, positions 133-238 of SEQ ID NO: 3, positions 133-238 of SEQ ID NO: 4, positions 133-238 of SEQ ID NO: 5, and positions 133-238 of SEQ ID NO: 6, respectively.

[0233] The amino acid sequences listed above may be one or more amino acid sequences selected from the group consisting of (i) the above-described amino acid sequence with one or several base sequence deletions, substitutions, insertions or additions, (ii) an amino acid sequence with 90% or greater homology to the above-described amino acid sequence, and (iii) an amino acid sequence encoded by a polynucleotide that hybridizes specifically to a polynucleotide consisting of abase sequence complementary to a base sequence encoding the above-described amino acid under stringent conditions, as long as an anti-LSR antibody has a desired effect.

[0234] A vector or polynucleotide encoding the anti-LSR antibody according to one embodiment of the present invention can be introduced into a cell to produce a transformant. Such a transformant can be used to make the anti-LSR antibody according to the embodiment of the present invention. The transformant may be a cell of a human or a mammal excluding humans (e.g., rat, mouse, guinea pig, rabbit, cow, monkey or the like). Examples of a mammalian cell include Chinese hamster ovary cells (CHO cells), monkey cells COS-7 and the like. Further, the tranformant may be Escherichia bacteria, yeasts or the like.

[0235] For example, an E. coli derived plasmid (e.g., pET-Blue), a Bacillus subtilis derived plasmid (e.g., pUB110), a yeast derived plasmid (e.g. pSH19), an animal cell expression plasmid (e.g., pA1-11, pdDNA3.1-V5/His-TOPO), bacteriophage such as A phage, a virus-derived vector or the like can be used as the above-described vector. Such vectors may comprise a constituent element required for protein expression such as a promotor, origin of replication, or antibiotic resistant gene. The vector may be an expression gene.

[0236] Examples of method of introducing the above-described polynucleotide or vector into cells that can be used include calcium phosphate method, lipofection, electroporation, method using adenovirus, method using a retrovirus, and microinjection (Revised 4th edition Shin Idenshikogaku Handobukku [New Genetic Engineering Handbook], Yodosha (2003): 152-179). Examples of a method of producing an antibody using a cell that can be used include the methods described in “Tanpakushitsu Jikken Handobukku [Protein experiment handbook], Yodosha (2003): 128-142”. Purification of antibodies can use, for example, ammonium sulfate, ethanol precipitation, protein A, protein G, gel filtration chromatography, anion, cation exchange chromatography, phosphocellulose chromatography, hydrophobic interaction chromatography, affinity chromatography, hydroxyapatite chromatography, lectin chromatography or the like “Tanpakushitsu Jikken Handobukku [Protein experiment handbook], Yodosha (2003): 27-52”.

[0237] To implement the present invention, a nucleic acid can be selected as the suppressantin a nucleic acid form of the present invention by using antisense activity as an indicator. In this regard, “antisense activity” refers to activity that can specifically suppress or decrease expression of a target gene. More specifically, antisense activity refers to activity that can decrease the amount of protein expression, depending on the nucleotide sequence introduced into cells, by specifically reducing the amount of mRNA of a gene having a nucleotide sequence region complementary to such a sequence. The approach thereof is roughly classified into a method of introducing an RNA molecule complementary to mRNA made from a target gene directly into cells, and a method of introducing a construct vector that can express an RNA complementary to a gene of interest into cells.

[0238] Antisense activity is achieved by a nucleic acid sequence with a length of at least 8 contiguous nucleotides, which is complementary to a nucleic acid sequence of a gene of interest. Such a nucleic acid sequence may be a nucleic acid sequence preferably with a length of at least 9 contiguous nucleotides, more preferably with a length of 10 contiguous nucleotides, and still more preferably with a length of 11 contiguous nucleotides, a length of 12 contiguous nucleotides, a length of 13 contiguous nucleotides, a length of 14 contiguous nucleotides, a length of 15 contiguous nucleotides, a length of 16 contiguous nucleotides, a length of 17 contiguous nucleotides, a length of 18 contiguous nucleotides, a length of 19 contiguous nucleotides, a length of 20 contiguous nucleotides, a length of 21 contiguous nucleotides, a length of 22 contiguous nucleotides, a length of 23 contiguous nucleotides, a length of 24 contiguous nucleotides, a length of 25 contiguous nucleotides, a length of 30 contiguous nucleotides, a length of 40 contiguous nucleotides, or a length of 50 contiguous nucleotides. Such a nucleic acid sequence includes nucleic acid sequences that are at least 70% homologous, more preferably at least 80% homologous, still more preferably 90% homologous or 95% homologous to the aforementioned sequences. Such antisense activity is preferably complementary to a sequence at the 5′ terminus of a nucleic acid sequence of a gene of interest. Such an antisense nucleic acid sequence includes the aforementioned sequences with one or several or one or more nucleotide substitutions, additions, and/or deletions. Thus, antisense activity as used herein includes, but is not limited to, decrease in the amount of gene expression.

[0239] Common antisense techniques are described in text books (Murray, JAH eds., Antisense RNA and DNA, Wiley-Liss Inc, 1992). Furthermore, the latest research has elucidated a phenomenon called RNA interference (RNAi), leading to development of antisense techniques.

[0240] As used herein, “RNAi” is an abbreviation of “RNA interference” and is commonly known in the art. RNA interference is a biological process that inhibits or downregulates gene expression in cells, mediated by an agent inducing RNAi. For example, RNA interference refers to a phenomenon of specific degradation of homologous mRNA to suppress the synthesis of gene products by introducing into a cell an agent inducing RNAi, such as a double stranded RNA (also called dsRNA), or a technique used therein. As used herein, “RNAi” may in some cases be used synonymously with “agent inducing RNAi”, “agent causing RNAi”, “RNAi agent” or the like. For RNAi, see, for example, Zamore and Haley, 2005, Science, 309, 1519-1524; Vaughn and Martienssen, 2005, Science 309, 1525-1526; Zamore et al., 2000, Cell, 101, 25-33; Bass, 2001, Nature, 411, 428-429; Elbashir et al., 2001, Nature, 411, 494-498; and Kreutzer et al, International Publication No. WO00/44895; Zernicka-Goetz et al, International Publication No. WO 01/36646; Fire, International Publication No. WO 99/32619; Plaetinck, et al., International Publication No. WO 00/01846; Mello and Fire, International Publication No. WO 01/29058; Deschamps-Depaillette, International Publication No. WO 99/07409 and Li et al., International Publication No. WO 00/44914; Allshire, 2002, Science, 297, 1818-1819; Volpe et al., 2002, Science, 297, 1833-1837; Jenuwein, 2002, Science, 297, 2215-2218; and Hall et al., 2002, Science, 297, 2232-2237; Hutvagner and Zamore, 2002, Science, 297, 2056-60; McManus et al., 2002, RNA, 8, 842-850; Reinhart et al., 2002, Gene & Dev., 16, 1616-1626; and Reinhart & Bartel, 2002, Science, 297, 1831. Further, it is understood that the term RNAi as used herein represents a synonym of other terms used to describe sequence specific RNA interference such as post-transcription gene silencing, inhibition of translation, inhibition of transcription, or epigenetics. As used herein, “agent causing RNAi” may be any agent as long as “RNAi” is caused.

[0241] Examples of “agent causing RNAi” as used herein include “small interfering nucleic acid” “siNA”, “small interfering RNA”, “siRNA”, “small interfering nucleic acid molecule”, “small oligonucleotide molecule”, “chemically modified small interfering nucleic acid molecule” and the like. These terms refer to any nucleic acid molecule that can inhibit or downregulate gene expression or virus replication by sequence specifically mediating RNA interference “RNAi” or gene silencing. These terms may represent an individual nucleic acid molecule, multiple such nucleic acid molecules, or a pool of such nucleic acid molecules. The molecules may be a double stranded nucleic acid molecule comprising a self-complementary sense region and an antisense region.

[0242] “SiRNA” that is typically used in the present invention is a doubled stranded RNA that is short with a length of generally about 20 bases (e.g., typically about 21-23 bases long) or less. Such an siRNA, when expressed in cells, suppresses gene expression and suppresses expression of a target pathogenic gene of the siRNA. Thus, such an siRNA can be used in therapy, prevention, prognosis or the like of a disease. The siRNA used in the present invention may be in any form, as long as it is capable of inducing RNAi.

[0243] In the present invention, an antisense region in an agent causing RNAi such as an siRNA comprises a sense region having a nucleotide sequence which is complementary to a nucleotide sequence in a target nucleic acid molecule or a portion thereof and a nucleotide sequence corresponding to the target nucleic acid sequence or a portion thereof. These molecules can be assembled from two separate oligonucleotides, one being a sense strand and the other being an antisense strand. The antisense strand and sense strand in this regard are self-complementary (i.e., each strand comprises a nucleotide sequence that is complementary to the nucleotide sequence in the other strand, e.g., the antisense strand and the sense strand form a double strand or double stranded structure). A double stranded region in this regard can be, for example, about 15 to about 30 base pairs such as about 15, 16, 17, 18, 19, 20, 21, 22, 23, 24, 25, 26, 27, 28, 29 or 30 base pairs or longer. The antisense strand comprises a nucleotide sequence that is complementary to a nucleotide sequence in a target nucleic acid molecule or a portion thereof, and the sense strand comprises a nucleotide sequence corresponding to the target nucleic acid sequence or a portion thereof (e.g., about 15-25 or more nucleotides of the molecule are complementary to a target nucleic acid or a portion thereof). Alternatively, these molecules are assembled from a single oligonucleotide, and the self-complementary sense region and antisense region of these molecules are linked by a nucleic acid linker or a non-nucleic acid linker. These molecules can be polynucleotides having a double stranded, asymmetrical double stranded, hairpin, or asymmetrical hairpin secondary structure comprising a self-complementary sense region and antisense region. The antisense region in this regard comprises a separate sense region having a nucleotide sequence which is complementary to a nucleotide sequence in a target nucleic acid molecule or a portion thereof and a nucleotide sequence corresponding to the target nucleic acid sequence or a portion thereof. These molecules may be a cyclic single stranded polynucleotide having two or more loop structures and a stem comprising a self-complementary sense region and antisense region. The antisense region in this regard comprises a separate sense region having a nucleotide sequence which is complementary to a nucleotide sequence in a target nucleic acid molecule or a portion thereof and a nucleotide sequence corresponding to the target nucleic acid sequence or a portion thereof. In addition, acyclic polynucleotide can be processed in vivo or in vitro to generate an active molecule that can mediate RNAi. These agents may also comprise a single stranded polynucleotide having a nucleotide sequence, which is complementary to a nucleotide sequence in a target nucleic acid molecule or a portion thereof (for instance, for these agents, a nucleotide sequence corresponding to the target nucleic acid molecule or a portion thereof does not need to be present in these agents). A single stranded polynucleotide may further comprise a terminal phosphoric acid group such as 5′ phosphoric acid (for example, see Martinez et Al., 2002, Cell., 110, 563-574 and Schwarz et al., 2002, Molecular Cell, 10, 537-568) or 5′, 3′-diphosphoric acid. In a certain embodiment, the LSR suppressant of the present invention comprises separate sense and antisense sequences or regions. The sense region and antisense region in this regard are covalently attached by a nucleotide or non-nucleotide linker molecule known in the art, or non-covalently attached to each other by ionic interaction, hydrogen bond, Van der Waal's interaction, hydrophobic interaction and/or stacking interaction. In a certain embodiment, the LSR suppressant of the present invention comprises a nucleotide sequence that is complementary to a nucleotide sequence of a target gene. In another embodiment, the LSR suppressant of the present invention interacts with a nucleotide sequence of a target gene such that expression of the target gene is inhibited. The LSR suppressantis not necessarily limited herein to molecules comprising only an RNA. The LSR suppressant also encompasses chemically modified nucleotides and non-nucleotides. In a certain embodiment, when the present invention is a small interfering nucleic acid molecule, a 2′ hydroxy (2′-OH) containing nucleotide may be lacking. In a certain embodiment, the present invention can be a small interfering nucleic acid, which does not require the presence of a nucleotide having a 2′ hydroxyl group for mediating RNAi. Thus, when the present invention is a small interfering nucleic acid molecule, ribonucleotide (e.g., nucleotide having a 2′-OH group) does not need to be included. However, when the presence of a ribonucleotide in an LSR suppressantis not required for maintaining RNAi, it may have a bound linker, or another bound or conjugated group, moiety or strand comprising one or more nucleotides having a 2′-OH group. Optionally, an agent suppressing LSRs of the present invention may comprise a ribonucleotide in about 5, 10, 20, 30, 40 or 50% of the nucleotide positions. Herein, the LSR suppressant may be a nucleic acid molecule that can mediate sequence specific RNAi, such as small interfering RNA (siRNA), double stranded RNA (dsRNA), microRNA (miRNA), short hairpin RNA (shRNA), small interfering oligonucleotide, small interfering nucleic acid, small interfering modified oligonucleotide, chemically modified siRNA, or post-transcriptional gene silencing RNA.

[0244] Examples of agents inducing RNAi herein include, but are not limited to, RNAs comprising a double stranded moiety with a length of at least 10 nucleotides, comprising a sequence having at least about 70% homology or a sequence that hybridizes under stringent conditions to a portion of a nucleic acid sequence of a target gene and variants thereof. The agent in this regard can preferably comprise a 3′ overhang, and more preferably the 3′ overhang is a DNA with a length of 2 nucleotides or longer (e.g., DNA with a length of 2-4 nucleotides).

[0245] Alternatively, examples of RNAi used in the present invention include, but are not limited to, a pair of short complementary sequences in the opposite direction (e.g., 15 bp or longer such as 24 bp or the like).

[0246] Although not wishing to be bound by any theory, as one conceivable working mechanism of RNAi, when a molecule inducing RNAi such as dsRNA is introduced into cells for a relatively long (e.g., 40 base pairs or greater) RNA, an RNase III-like nuclease called a dicer having a helicase domain cuts out the molecule into about 20 base pair each from the 3′ terminus in the presence of ATP to produce short dsRNA (also called siRNA). As used herein, “siRNA” is an abbreviation for short interfering RNA and refers to a short double stranded RNA with 10 base pairs or more prepared by artificial chemical synthesis or biochemical synthesis, synthesis in the body of an organism, or degradation of a double stranded RNA with about 40 bases or more in vivo. An siRNA generally has a 5′-phosphoric acid or 3′-OH structure, and the 3′ terminus overhangs by about 2 bases. A specific protein binds to the siRNA to form an RISC (RNA-induced-silencing-complex). Such a complex recognizes and binds to an mRNA having the same sequence as the siRNA and cleaves the mRNA in the middle portion of the siRNA by RNase III-like enzymatic activity. The relationship of the siRNA sequence and mRNA sequence to be cleaved as a target is preferably a 100% match. However, for a mutation of a base at a position away from the middle of the siRNA, cleaving activity due to RNAi would not be completely lost, but instead partially remains. On the other hand, a mutation of a base in the middle portion of the siRNA has a significant effect, such that mRNA cleaving activity due to RNAi is dramatically reduced. For mRNAs with a mutation, such a property can be utilized to degrade only mRNAs comprising a specific mutation by synthesizing an siRNA with the mutation positioned in the middle and introducing the siRNA into cells. Thus, the present invention can use an siRNA itself as an agent inducing RNAi or an agent that would produce an siRNA (e.g., typically a dsRNA with about 40 or more bases) as such an agent.

[0247] Although not wishing to be bound by any theory, it is intended for siRNAs that, aside from the above-described pathway, an antisense strand of the siRNA binds to an mRNA and acts as a primer of an RNA-dependent RNA polymerase (RdRP), such that a dsRNA is synthesized and the dsRNA is used again as a substrate of a dicer to produce a new siRNA and amplify the action. Thus, the siRNA itself and agents producing an siRNA are also useful in the present invention. In fact, for example, 35 dsRNA molecules nearly completely degrade 1000 or more mRNA copies in cells in insects or the like. Thus, it is understood that the siRNA itself and agents producing an siRNA are also useful.

[0248] In another embodiment, the agent inducing RNAi of the present invention can be a short hairpin structure (shRNA; short hairpin RNA) having an overhang at the 3′ terminus. As used herein, “shRNA” refers to a molecule with about 20 or more base pairs, which comprises a partially palindrome-like base sequence in a single stranded RNA to be in a double stranded structure in a molecule to have a hairpin-like structure. Such an shRNA is artificially made by chemical synthesis. Alternatively, such an shRNA can be produced by synthesizing a hairpin structure DNA comprising DNA sequences of sense and antisense strands linked in opposite directions in vitro into an RNA with a T7RNA polymerase. Although not wishing to be bound by any theory, it should be understood that such an shRNA, after introduction into cells, is degraded into a length of about 20 bases (typically, for example, 21 bases, 22 bases or 23 bases) in the cells and induces RNAi as in an siRNA, resulting in a treatment effect of the present invention. It should be understood that such an effect is exerted in a wide range of organisms such as insects, plants and animals (including mammals). Since an shRNA induces RNAi as in siRNAs in this manner, it can be used as an effective ingredient of the present invention. Further, an shRNA preferably can have a 3′ overhang. The length of a double stranded moiety is not particularly limited, but the length can be preferably about 10 nucleotides long or longer and more preferably about 20 nucleotides long or longer. The 3′ overhang in this regard can be preferably a DNA, more preferably a DNA with a length of at least two nucleotides or more, and still more preferably a DNA with a length of 2-4 nucleotides. The agent inducing RNAi used in the present invention can be artificially synthesized (e.g., chemically or biochemically) or naturally occurring. There is no fundamental difference in the effect of the present invention therebetween. A chemically synthesized agent is preferably purified by liquid chromatography or the like.

[0249] The agent inducing RNAi used in the present invention can also be synthesized in vitro. In such a synthesis system, a T7RNA polymerase and T7 promoter are used to synthesize antisense and sense RNAs from a template DNA. After annealing is performed thereon in vitro, RNAi is induced through the aforementioned mechanism when cells are introduced to achieve the effect of the present invention. In this regard, such an RNA can be introduced into cells, for example, by any suitable method such as the calcium phosphate method. Examples of the agents inducing RNAi of the present invention include agents such as a single strand that can hybridize with an mRNA or all similar nucleic acid analogs thereof. Such agents are also useful in the present invention.

[0250] One embodiment of the present invention is a therapeutic drug for LSR positive malignant tumor comprising an RNAi molecule directed to LSRs or a polynucleotide encoding the RNAi molecule. Growth of LSR positive malignant tumor cells can be suppressed when such an RNAi molecule or polynucleotide encoding the RNAi molecule is used. “Polynucleotide” in one embodiment of the present invention may be a polymeric compound having 10 or more nucleotides, comprising a nucleotide polymerized in a straight chain.

[0251] “RNAi molecule” in one embodiment of the present invention is an RNA strand having RNAi action. Examples thereof include siRNA, shRNA, miRNA, small RNA having RNAi action and the like.

[0252] “RNAi” in one embodiment of the present invention includes a phenomenon of suppressing or silencing a function of a target gene, mRNA or the like by one or more of siRNA, shRNA, miRNA, single or double stranded RNA with a short or long chain, modified products thereof and the like.

[0253] For example, siDirect 2.0 (Naito et al., BMC Bioinformatics. 2009 Nov. 30; 10: 392.) or the like can be used to design an RNAi molecule. Further, designing can be commissioned to a specialist company (e.g., Takara Bio Inc. or the like). RNAi action can be verified by quantification of the amount of RNA strand expression by real-time RT-PCR. RNAi action can also be confirmed by analysis of the amount of RNA strand expression by Northern blot or a method of analyzing the amount of protein and observing the phenotype or the like by Western blot. Further, a plasmid producing siRNAs or shRNAs for a specific gene can be purchased, for example, from a specialist company (e.g., Takara Bio Inc. or the like).

[0254] “SiRNA” in one embodiment of the present invention comprises an RNA strand capable of inducing RNAi. Two strands of an siRNA can generally be separated into a guide strand and a passenger strand, where the guide strand in incorporated into an RISC. The guide strand incorporated into the RISC is used to recognize a target RNA. Although an artificially created guide strand is mainly used in RNAi research, those endogenous in a living body are also known. The above-described guide chain may be composed of an RNA with 15 bases or more. When there are 15 bases or more, the possibility of being able to precisely bind to a target nucleotide increases. Further, the guide strand may be composed of an RNA with 40 bases or less. With 40 bases or less, the risk of a disadvantageous phenomenon such as interferon response occurring is further reduced.

[0255] “shRNA” in one embodiment of the present invention comprises a single strand of RNA strand that can induce RNAi and form a structure folded into a hairpin shape (hairpin-like structure). Typically, an shRNA is cleaved by a dicer in a cell to cut out an siRNA. It is known that a target RNA is cleaved by the siRNA. The above-described shRNA may be composed of 35 or more nucleotides. With 35 or more, the possibility of being able to precisely form a hairpin-like structure unique to shRNAs increases. Further, the above-described shRNA may be composed of an RNA with 100 bases or less. With 100 bases or less, the risk of a disadvantageous phenomenon such as interferon response occurring is reduced. However, many of the pre-miRNAs that generally have a similar structure and function as shRNAs have a length of about 100 nucleotides or more. Thus, it is conceivable that they can function as a shRNA even when the length of the shRNA is not necessarily 100 bases or less.

[0256] It is known that “miRNA” in one embodiment of the present invention comprises an RNA strand having a function similar to an siRNA and suppresses translation of, and degrades, a target RNA strand. The difference in miRNAs and siRNAs is generally in the production pathway and the detailed mechanism.

[0257] “Small RNA” in one embodiment of the present invention refers to a relatively small RNA strand. Examples thereof include siRNAs, shRNAs, miRNAs, antisense RNAs, small RNAs with one or two strands and the like.

[0258] The RNAi molecules may comprise an overhang consisting of 1-5 bases at the 5′ terminus or the 3′ terminus. It is understood that RNAi efficiency is enhanced in such a case. The number of bases may be, for example, 5, 4, 3, 2, or 1, or within a range of any two values described above. When the above-described RNAi molecule is double stranded, a mismatching RNAs may be present between each RNA strand. The number of mismatching RNAs may be, for example, 1, 2, 3, 4, 5, or 10 or less, or within the range of any two values described above. Further, the above-described RNAi molecule may comprise a hairpin loop. The number of bases of a hairpin loop may be, for example, 10, 8, 6, 5, 4, or 3 or within any two values described above. The base sequence may have one or a plurality of base sequence deletions, substitutions, insertions or additions, as long as the sequence has a desired effect. The left side of each base sequence is denoted as the 5′ terminus and the right side as the 3′ terminus.

[0259] The length of the above-described RNAi molecule may be, for example, 15, 18, 20, 25, 30, 40, 50, 60, 80, 100, 200, or 400 bases or within a range between any two values described above. The number is preferably 15 or more or 100 or less from the viewpoint of improving the therapeutic effect on LSR positive malignant tumor.

[0260] “RNA strand” in one embodiment of the present invention includes those constituted in a form in which a plurality of RNAs or equivalents thereof are bound. “DNA strand” in one embodiment of the present invention includes those constituted in a form in which a plurality of DNAs or equivalents thereof are bound. The RNA strand or DNA strand includes RNA strands or DNA strands in a single stranded or multi-stranded (e.g., double stranded) form. The RNA strand or DNA strand may be bound to a substance promoting incorporation into cells (e.g., PEG or derivative thereof), labeling tag (e.g., fluorescent labeling tag or the like), a linker (e.g., nucleotide linker or the like) or the like. The RNA strand or DNA strand can be synthesized by using a nucleic acid synthesizer or purchased from a specialist company (e.g., Invitrogen or the like). An RNA strand or DNA strand in a living body may form a salt or a solvate. Further, an RNA strand or DNA strand in a living body may be chemically modified. The term RNA strand or DNA strand includes, for example, RNA strands or DNA strands forming a salt or solvate, RNA strands or DNA strands subjected to chemical modification, and the like. Further, an RNA strand or DNA strand may be an analog of the RNA strand or an analog of the DNA strand.

[0261] Examples of “salt” in one embodiment of the present invention include anionic salts formed with any acidic (e.g., carboxyl) group and cationic salts formed with any basic (e.g., amino) group. Salts include inorganic salts and organic salts, as well as salts described in, for example, Berge et al., J. Pharm. Sci., 1977, 66, 1-19. Further examples include metal salts, ammonium salts, salts with organic base, salts with inorganic acid, salts with organic acid and the like. “Solvent” in one embodiment of the present invention is a compound formed with a solute or solvent. For example, J. Honig et al., The Van Nostrand Chemist's Dictionary P650 (1953) can be referred for solvates. When a solvent is water, a solvate formed is a hydrate. It is preferable that the solvent does not obstruct the biological activity of the solute. Examples of such a preferred solvent include, but not particularly limited to water and various buffers. Examples of “chemical modification” in one embodiment of the present invention include modification with PEG or a derivative thereof, fluorescein modification, biotin modification and the like.

[0262] The above-described RNAi molecule preferably comprises a base sequence that is complementary to a port ion of abase sequence of an LSR mRNA from the viewpoint of stably exerting RNAi action. The above-described “portion” may be, for example, 5, 10, 15, 18, 20, 22, 24, 26, 28, 30, 35, 40 or 50 bases or more or within a range of any two values described above.

[0263] The siRNA used in Example 3 described below comprises the base sequence of SEQ ID NO: 9 or 10. These base sequences are considered to be base sequences complementary to a portion of an LSR mRNA and responsible for the function as a guide strand. One embodiment of the present invention comprises an RNAi molecule comprising such the base sequence of SEQ ID NO: 9 or 10. The RNAi molecule may further comprise a base sequence complementary to the base sequence set forth in SEQ ID NO: 9 or 10 (e.g., SEQ ID NO: 11 or 12, respectively). “Complementary base sequence” in one embodiment of the present invention is abase sequence having a polynucleotide with high complementarity capable of hybridizing to another polypeptide. The full length sense strand of the siRNA used in Example 3 described below is the base sequence of SEQ ID NO: 13 or 14, and the full length antisense strand is the base sequence of SEQ ID NO: 15 or 16.

[0264] As long as an LSR siRNA has a desired effect, the base sequences listed above may be (i) an amino acid sequence with one or several base sequence deletions, substitutions, insertions or additions in the above-described base acid sequence, or (ii) abase sequence encoded by a polynucleotide that specifically hybridizes with a polynucleotide consisting of a base sequence complementary to the above-described base sequence under stringent conditions.

[0265] One embodiment of the present invention is a therapeutic drug for LSR positive malignant tumor, comprising an LSR antagonist. The LSR antagonist comprises a substance inhibiting the expression or function of an LSR. The growth of LSR positive malignant tumor cells can be suppressed by using such an LSR antagonist. The form of antagonist is not particularly limited as long as it has an action of inhibiting the expression or function of an LSR. For example, the antagonist may be in a form of an antibody, RNA strand, DNA strand, low molecular weight organic compound, or polypeptide. The above-described RNA strand may be an RNAi molecule directed to an LSR. A DNA strand encoding an RNAi molecule directed to an LSR can be used as the above-described DNA strand. For example, the DNA strand may be in a form of a vector.

[0266] Examples of “inhibit the expression of a protein” in one embodiment of the present invention include inhibiting the transcription mechanism from a gene to an mRNA or inhibiting the translation mechanism from an mRNA to a protein. Examples further include inducing degradation of a gene, mRNA or protein to ultimately decrease the amount of protein. “Inhibit a function of protein” in one embodiment of the present invention includes causing a structural change in a protein to reduce the activity of the protein. Examples thereof further include inhibiting the expression of a gene, resulting in reduction in the amount of mRNA or protein production.

[0267] “State where expression is inhibited” in one embodiment of the present invention includes a state of significantly decreased amount of expression relative to normal levels. The amount of mRNA or protein may be used as an indicator for the amount of expression. “Significantly” in one embodiment of the present invention may be, for example, a state where there is a statistically significant difference, when assessed by Student's t-test (one or two tailed), at p<0.05. Further, a state where a substantial difference has occurred is also included. “State where a function is inhibited” in one embodiment of the present invention includes a state with significantly decreased activity relative to normal levels.

[0268] One embodiment of the present invention is a novel method of therapy for malignant tumor. Such a therapeutic method comprises, for example, a step of administering an anti-LSR antibody to a patient. LSR positive malignant tumor can be treated by using such a therapeutic method. Further, such a therapeutic method is excellent from the viewpoint of safety, as the method uses antibodies.

[0269] There are LSR positive and LSR non-positive patients among malignant tumor patients. For this reason, the above-described therapeutic method is preferably administered to a malignant tumor patient determined to have malignant tumor that is LSR positive malignant tumor. In this manner, diagnosis for the presence or absence of an LSR positive condition in advance enables a more optimal dosing.

[0270] Thus, the above-described therapeutic method for malignant tumor preferably comprises a step of diagnosing whether a patient has an episode of LSR positive malignant tumor from the viewpoint of administering a more optimal dosing. Further, the therapeutic method may comprise a step of investigating whether malignant tumor cells derived from a patient express LSRs. An episode of LSR positive malignant tumor may be diagnosed, for example, by diagnosing mRNA expression or protein expression. The diagnosis is preferably conducted by diagnosis of protein expression from the viewpoint of accurately diagnosing LSR positive to realize a more optimal dosing. Protein expression may be diagnosed by using, for example, an anti-LSR antibody. In diagnosis of an episode, an episode of LSR positive malignant tumor may be determined to be present when a protein obtained from malignant tumor cells to be tested derived from a patient is subjected to Western blot and a band corresponding to LSRs can be confirmed by visual inspection. Further, an episode of LSR positive malignant tumor may be determined to be present when the amount of LSR expression of malignant tumor cells derived from a patient is significantly larger relative to normal cells or LSR negative malignant tumor cells. Further, an episode of LSR positive malignant tumor may be determined to be present when total protein obtained from malignant tumor cells derived from a patient and total protein obtained from normal cells or LSR negative malignant tumor cells are subjected to Western blot and the malignant tumor cells derived from the patient have a significantly stronger band intensity corresponding to LSRs relative to the normal cells or LSR negative malignant tumor cells. Further, an episode of LSR positive malignant tumor may be determined to be present when serum or plasma obtained from malignant tumor patients and serum or plasma obtained form healthy individuals or LSR negative malignant tumor patients are subjected to ELISA using anti-LSR antibodies and the amount of LSR expression is significantly more for the serum or plasma derived from malignant tumor patients relative to healthy individuals or LSR negative malignant tumor patients. The serum or plasma sample itself may be quantified, or exosomes may be isolated from the serum or plasma to subject LSRs in the exosomes to ELISA for analysis. RT-PCR may be used instead of Western blot in such diagnosis for an episode of LSR positive malignant tumor.

[0271] The therapeutic method of malignant tumor according to one embodiment of the present invention may comprise a step of administering an LSR antagonist to a patient. Further, the method may comprise a step of administering an RNAi molecule directed to an LSR or a polynucleotide encoding the RNAi molecule to the patient.

[0272] One embodiment of the present invention is a novel diagnostic drug for malignant tumor, comprising an anti-LSR antibody. The diagnostic drug may be, for example, a companion diagnostic drug for malignant tumor therapy targeting LSRs, comprising an anti-LSR antibody. Since there are LSR positive and LSR non-positive patients among malignant tumor patients, therapeutic efficacy of the malignant tumor therapy targeting LSRs can be diagnosed if the companion diagnostic drug is used to inspect in advance whether malignant tumor is LSR positive. In such diagnosis, when the result is LSR positive, malignant tumor therapy targeting LSRs can be determined to be effective. “Companion diagnosis” in one embodiment of the present invention comprises diagnosis implemented in order to assist in the optimal dosing by predicting individual differences in the effect of agent or side effects for patients by inspection. For clinical application of an antibody medicament with anti-LSR antibodies, it is understood that selective therapy for LSR expressing-malignant tumor patients would lead to individualized medicine. For this reason, a method of sorting out an LSR positive patient is needed. An approach that inspects LSRs in a biopsy tissue of cancer by an immunohistochemical staining method is considered highly useful as a method of sorting out an LSR positive patient. However, obtaining a biopsy tissue is highly invasive. Thus, a method with a low level of invasiveness is preferred. Furthermore, certain types of malignant tumor such as ovarian cancer are problematic in that biopsy tissue is difficult to obtain due to the issues related to the site of cancer. In contrast, LSRs expressed in cancer or the extracellular domain thereof may be freely present in blood. In this regard, the possibility of high level of LSR expression in ovarian cancer tissue in a patient with a high blood LSR concentration is suggested when LSRs in the blood of a malignant tumor patient can be quantified. A blood sample is more advantageous than biopsy in that the level of invasiveness is low. It is highly likely that LSR is highly expressed in patient tissue with elevated blood LSR concentration relative to healthy individuals after quantifying the blood LSR concentration by ELISA. Thus, measurement of blood LSR concentration is considered highly useful as a companion diagnostic drug.

[0273] A diagnostic drug for malignant tumor according to one embodiment of the present invention may be a diagnostic drug comprising an anti-LSR antibody for diagnosis of therapeutic efficacy of the anti-LSR antibody or LSR antagonist on malignant tumor. Since there are LSR positive and LSR non-positive patients among malignant tumor patients, it is possible to diagnose the therapeutic efficacy of an anti-LSR antibody or LSR antagonist to patients if the diagnostic agent is used in advance to inspect whether malignant tumor is LSR positive.

[0274] One embodiment of the present invention is a companion diagnostic method for malignant tumor therapy targeting an LSR, comprising inspecting whether a malignant tumor sample of a malignant tumor patient is LSR positive. Since there are LSR positive and LSR non-positive patients among malignant tumor patients, it is possible to diagnose the therapeutic efficacy of malignant tumor therapy targeting an LSR if the companion diagnosis method is used to inspect in advance whether malignant tumor is LSR positive. Such a diagnostic method may further comprise a step of isolating or extracting a malignant tumor sample of a malignant tumor patient. “Malignant tumor sample” in one embodiment of the present invention may be malignant tumor tissue or cells obtained from a malignant tumor patient.

[0275] One embodiment of the present invention is a method of diagnosing prognosis of malignant tumor using an LSR expression level as an indicator. High level of LSR expression is demonstrated to be a poor prognosis marker (FIG. 38). Thus, a high level of LSR expression can be considered a poor prognosis marker. In one embodiment, cancer subjected to prognosis is ovarian serous adenocarcinoma, but the cancer is not limited thereto. It is understood that the present invention can be applied to ovarian clear cell adenocarcinoma and the like. It is also understood that the present invention can be applied to any other LSR positive malignant tumor. A method of using such a (poor) prognosis marker may comprise, for example, a step of investigating whether LSRs are expressed in malignant tumor cells derived from a patient. The prognosis (diagnosis) of LSR positive malignant tumor may be conducted, for example, by diagnosis or detection of mRNA expression or diagnosis or detection of protein expression. Such diagnosis or detection is preferably conducted by diagnosis of protein expression from the viewpoint of accurately diagnosing LSR positive to realize a more optimal dosing. Protein expression may be diagnosed by using, for example, an anti-LSR antibody. In diagnosis of an episode, the prognosis of malignant tumor may be determined to be poor when a protein obtained from malignant tumor cells to be tested derived from a patient is subjected to Western blot and enhancement in a band corresponding to LSRs can be confirmed by visual inspection. Further, the prognosis of malignant tumor may be determined to be poor when the amount of LSR expression of malignant tumor cells derived from a patient is significantly larger relative to normal cells or LSR negative malignant tumor cells (e.g., LSR negative cell strains such as OVTOKO). Further, the prognosis of malignant tumor may be determined to be poor when total protein obtained from malignant tumor cells derived from a patient and total protein obtained from normal cells or LSR negative malignant tumor cells (e.g., LSR negative cell strains such as OVTOKO) are subjected to Western blot and the malignant tumor cells derived from the patient have a significantly stronger band intensity corresponding to LSRs relative to the normal cells or LSR negative malignant tumor cells (e.g., LSR negative cell strains such as OVTOKO). Further, the prognosis of malignant tumor may be determined to be poor when serum or plasma obtained from malignant tumor patients and serum or plasma obtained form healthy individuals or LSR negative malignant tumor patients (e.g., “patient whose LSR expression is negative in ovarian cancer tissue”) are subjected to ELISA using anti-LSR antibodies and the amount of LSR expression is significantly more for the serum or plasma derived from malignant tumor patients relative to the healthy individuals or LSR negative malignant tumor patients. The serum or plasma sample itself may be quantified, or exosomes may be isolated from the serum or plasma to subject LSRs in the exosomes to ELISA for analysis. RT-PCR may be used instead of Western blot in such diagnosis of an episode of LSR positive malignant tumor.

[0276] One embodiment of the present invention is a method of inspecting therapeutic efficacy of an anti-LSR antibody or LSR antagonist on malignant tumor. The inspection method comprises, for example, inspecting whether a malignant tumor sample of a malignant tumor patient is LSR positive. The inspection method, which may comprise a step of detecting the presence of LSRs in a malignant tumor sample, may comprise a step of detecting that the amount of LSRs in the malignant tumor sample is significantly larger relative to normal cells or LSR negative malignant tumor cells. For example, RT-PCR, Westernblot, or immunohistochemical staining method may be used in detecting LSRs. The standard of assessing the presence or absence of LSRs may be the same as that in the aforementioned diagnosis of episode of LSR positive malignant tumor. A method of inspecting therapeutic efficacy includes a method of inspecting whether the method is effective for therapy.

[0277] One embodiment of the present invention is a suppressant for growth of malignant tumor cells, comprising anti-LSR antibodies. Further, it is a method of suppressing growth of malignant tumor cells, comprising contacting anti-LSR antibodies with malignant tumor cells. Further, it is a suppressant for growth of malignant tumor cells, comprising an LSR antagonist. Further, it is a method of suppressing growth of malignant tumor cells, comprising contacting an LSR antagonist with malignant tumor cells. The therapeutic drug or suppressant for growth of malignant tumor cells according to the embodiment of the present invention may be an agent that reduces the growth rate, amount of growth, or volume of malignant tumor by 10, 20, 30, 40, 50, or 70% or more relative to a case where a therapeutic drug or growth suppressantis not added. The percentage may be within the range of two numerical values listed above.

[0278] One embodiment of the present invention is an agent for suppressing cell division of malignant tumor cells, comprising an anti-LSR antibody. Further, it is a method of suppressing cell division of malignant tumor cells, comprising contacting an anti-LSR antibody with malignant tumor cells. Further it is an agent for suppressing cell division of a malignant tumor cell, comprising an LSR antagonist. Further, it is a method of suppressing cell division of malignant tumor cells, comprising contacting an LSR antagonist with malignant tumor cells. The agent for suppressing cell division of a malignant tumor cell according to the embodiment of the present invention may be an agent that reduces the rate of malignant tumor cell division by 10, 20, 30, or 50% or more relative to a case where an agent for suppressing cell division is not added. The percentage may be within the range of two numerical values listed above.

[0279] One embodiment of the present invention is a therapeutic drug for LSR-dependent malignant tumor, comprising an anti-LSR antibody. LSR-dependent malignant tumor can be treated by using such a therapeutic drug.

[0280] One embodiment of the present invention is use of an anti-LSR antibody or LSR antagonist for producing a therapeutic drug for malignant tumor. In another embodiment, it is a use of an anti-LSR antibody for manufacturing a companion diagnostic drug for malignant tumor therapy targeting an LSR.

[0281] One embodiment of the present invention is a method of producing an anti-LSR antibody, comprising: introducing a polynucleotide encoding an LSR into a cell; expressing the LSR in the cell; and immunizing a chicken with an antigen comprising a cell expressing the LSR. According to the production method, an anti-LSR antibody that is excellent for the treatment or diagnosis of LSR positive malignant tumor can be efficiently produced.

[0282] “Bond” in one embodiment of the present invention may be either a covalent bond or a non-covalent bond. For example, “bond” may be an ionic bond, hydrogen bond, hydrophobic interaction, or hydrophilic interaction.

[0283] (General Techniques)

[0284] Molecular biological approach, biochemical approach, and microbiological approach used herein are well known and conventional approaches in the art that are described in, for example, Sambrook J. et al. (1989). Molecular Cloning: A Laboratory Manual, Cold Spring Harbor and 3^{rd} Ed. thereof (2001); Ausubel, F. M. (1987). Current Protocols in Molecular Biology, Greene Pub. Associates and Wiley-Interscience; Ausubel, F. M. (1989). Short Protocols in Molecular Biology: A Compendium of Methods from Current Protocols in Molecular Biology, Greene Pub. Associates and Wiley-Interscience; Innis, M. A. (1990). PCR Protocols: A Guide to Methods and Applications, Academic Press; Ausubel, F. M. (1992). Short Protocols in Molecular Biology: A Compendium of Methods from Current Protocols in Molecular Biology, Greene Pub. Associates; Ausubel, F. M. (1995). Short Protocols in Molecular Biology: A Compendium of Methods from Current Protocols in Molecular Biology, Greene Pub. Associates; Innis, M. A. et al. (1995). PCR Strategies, Academic Press; Ausubel, F. M. (1999). Short Protocols in Molecular Biology: A Compendium of Methods from Current Protocols in Molecular Biology, Wiley, and annual updates; Sninsky, J. J. et al. (1999). PCR Applications: Protocols for Functional Genomics, Academic Press, Bessatsu Jikken Igaku [Experimental Medicine, Supplemental Volume], Idenshi Donyu Oyobi Hatsugen Kaiseki Jikken Ho [Experimental Methods for Transgenesis & Expression Analysis], Yodosha, 1997, and the like, the relevant portions (which can be the entire document) of which are incorporated herein by reference.

[0285] DNA synthesis techniques and nucleic acid chemistry for making an artificially synthesized gene are described in, for example, Gait, M. J. (1985). Oligonucleotide Synthesis: A Practical Approach, IRL Press; Gait, M. J. (1990). Oligonucleotide Synthesis: A Practical Approach, IRL Press; Eckstein, F. (1991). Oligonucleotides and Analogues: A Practical Approach, IRL Press; Adams, R. L. et al. (1992). The Biochemistry of the Nucleic Acids, Chapman&Hall; Shabarova, Z. et al. (1994). Advanced Organic Chemistry of Nucleic Acids, Weinheim; Blackburn, G. M. et al. (1996). Nucleic Acids in Chemistry and Biology, Oxford University Press; Hermanson, G. T. (1996). Bioconjugate Techniques, Academic Press and the like, the relevant portions of which are incorporated herein by reference.

[0286] For example, as used herein, the oligonucleotide of the present invention can also be synthesized by a standard method known in the art, such as by using an automated DNA synthesizer (a synthesizer commercially available from Biosearch, Applied Biosystems Or the like). For example, a phosphorothioate-oligonucleotide can also be synthesized by the method of Stein et al. (1988, Mud. Acids Res. 16: 3209), and a methyl phosphonate-oligonucleotide can also be prepared by using a control pore glass polymer support (Sarin et al., 1988, Proc. Natl. Acad. Sci. USA 85: 7448-7451).

[0287] As used herein, “or” is used when “at least one or more” of the matters listed in the sentence can be employed. When explicitly described herein as “within the range of two values”, the range also includes the two values themselves.

[0288] Reference literatures such as scientific literatures, patents, and patent applications cited herein are incorporated herein by reference to the same extent that the entirety of each document is specifically described.

[0289] As described above, the present invention has been described while showing preferred embodiments to facilitate understanding. The present invention is described below based on Examples. The aforementioned description and the following Examples are not provided to limit the present invention, but for the sole purpose of exemplification. Thus, the scope of the present invention is not limited to the embodiments and Examples specifically described herein and is limited only by the scope of claims.

### EXAMPLES

[0290] Hereinbelow, the present invention is further described by examples. However, the present invention is not limited to these.

### Example 1

### LSR Expression Analysis

[0291] 1.1 Quantitative Analysis of Cell Surface Membrane Protein According to iTRAQ Method

[0292] Identification of an ovarian-cancer-specific cancer antigen protein was tried by searching for a cell surface membrane protein highly expressed in ovary serous adenocarcinoma cell strains (OVCAR3, OVSAHO, and JHOS4) in comparison with normal ovarian epithelial cell strains (HOSE2C and E7/TERT). First, for a cell strain cultured in a 150 mm Petri dish, the cell surface membrane proteins were biotinylated with sulfo-NHS-SS-biotin. The extracted proteins were purified by Neurto-avidin beads. At this time, in order to correct the error between the samples, sulfo-NHS-SS-biotin-labeled bovine serum albumin was added to each in an equal amount as an internal standard, and was used for correction of quantification results by a mass spectrometer. The purified proteins were digested by trypsin and labeled with an iTRAQ reagent. The samples were mixed into one and it was roughly fractionated into 24 fractions by ion exchange HPLC. Each of the fractions was desalinated and then measured by a mass spectrometer (nano LC-MS/MS) analysis. A data base was searched for the obtained data using proteome discoverer ver. 1.1 and thereby the proteins were identified and quantified. It should be noted that the ovarian cancer surgery tissues used in the examples were provided from patients whose agreements to informed consents were obtained in Osaka University Hospital.

[0293] As a result of analysis according to an iTRAQ method, it was found that LSR was specifically and highly expressed in the above-mentioned ovary serous adenocarcinoma cell strains as below.

TABLE 1

| | E7TERT/ | | | | |
|---|---|---|---|---|---|
| Description | HOSE2C | Criteria | OVCAR3 | OVSAHO | JHOS4 |
| LSR | 3.092 | HOSE2C | 10.939 | 11.412 | 9.073 |
| | | E7/TERT | 5.207 | 5.328 | 3.301 |

### 1.2 RT-PCR

[0294] RNAs of a normal ovarian epithelial cell strain (HOSE2C), ovary serous adenocarcinoma cell strains (OVCAR3, OVSAHO, and JHOS4), ovarian clear cell adenocarcinoma cell strains (OVTOKO, OVMANA, OVISE, and RGMI), normal endometrial cell strains (E6/E7/TERT) andendometrial cancer (HEC1, HEC1A, HEC6, HEC88nu, HEC108, HEC116, HEC251, and SNGM) were each purified by the RNeasymini kit (QIAGEN). Further, reverse transcription into cDNA was carried out using the QuantiTect Reverse Transcription Kit (Qiagen). RT-PCR was carried out using the TaKaRaEx Taq DNA polymerase (TakaraBio, Shiga, Japan). Primers of the following sequences were used in the RT-PCR.

LSR:
forward primer
(SEQ ID NO: 17)
5′-GGGAGGACCTCAGGGGTGGC-3′
and
reverse primer
(SEQ ID NO: 18)
5′-TGGTGGGGGTGGGGTCTTGG-3′;
and
β-actin:
forward primer
(SEQ ID NO: 19)
5′-AGCCTCGCCTTTGCCGA-3′
and
reverse primer
(SEQ ID NO: 20)
5′-CTGGTGCCTGGGGCG-3′.

[0295] The results of the above were shown in FIGS. 1 to 3. In the ovary serous adenocarcinoma cell strains OVCAR3, OVSAHO, and JHOS4, the ovarian clear cell adenocarcinoma cell strains OVMANA, OVISE, and RGMI, and the endometrial cancer cell strains HEC1, HEC1A, HEC6, HEC88nu, HEC108, HEC116, HEC251, and SNGM, a band corresponding to LSR mRNA was detected. In the normal ovarian epithelial cell strains, for HOSE2C, it was not detected.

### 1.3 Western Blot

[0296] Ten μg each of proteins obtained from the normal ovarian epithelial cell strain (HOSE2C), the ovary serous adenocarcinoma cell strains (OVCAR3, OVSAHO, SKOV3, JHOS2, and JHOS4), the ovarian clear cell adenocarcinoma cell strains (OVTOKO, OVMANA, OVISE, and RGMI), the normal endometrial cell strains (E6/E7/TERT) and the endometrial cancer (HEC1, HEC1A, HEC6, HEC88nu, HEC108, HEC116, HEC251, and SNGM) were applied to SDS-PAGE (5 to 20% gradient gel (Wako Pure Chemical Industries, Ltd.)). Then, they were subjected to migration at 40 mA for 50 minutes and subsequently transferred to PVDF membranes at 120 mA for 1 hour. After the transfer, blocking was carried out in 1% BSA/TBST (TBS+0.1% Tween 20) at room temperature for 1 hour and then incubation with an anti-LSR antibody (Santa Cruz Biotechnology) was carried out at room temperature for 1 hour. After washing with TBST for 10 minutes three times for each, the PVDF membranes were incubated at room temperature for 1 hour using an HRP-labeled anti-rabbit antibody (GE healthcare) that had been diluted 5,000 times with TBST. The PVDF membranes were washed with TBST for 10 minutes three times for each and then the reacted proteins were detected by a fluorescence reaction system (Perkin Elmer, Inc.).

[0297] The results of the above are shown in FIGS. 4 to 6. In the ovary serous adenocarcinoma cell strains OVCAR3, OVSAHO, and JHOS4, ovarian clear cell adenocarcinoma cell strains OVMANA, OVISE, and RGMI, and the endometrial cancer cell strains HEC1, HEC1A, HEC6, HEC88nu, HEC108, HEC116, HEC251, and SNGM, a band corresponding to LSR was detected. Meanwhile, in the ovarian clear cell adenocarcinoma cell strain OVTOKO, a band corresponding to LSR was not detected. In the normal ovarian epithelial cell strain, a band corresponding to LSR was not detected in any of HOSE2C. From the above results, it is understood that the LSR protein is specifically expressed at the above-mentioned cancers.

[0298] Moreover, for proteins obtained from normal ovarian tissues, ovary serous adenocarcinoma surgery tissues, ovarian clear cell adenocarcinoma surgery tissues, normal endometrial tissues, and endometrial cancer surgery tissues, Western blot was carried out using an anti-LSR antibody (Santa Cruz Biotechnology). An anti-GAPDH antibody (Santa Cruz Biotechnology) was used as a loading control. The tissues used for the Western blot were obtained from healthy humans or patients suffering from respective cancers.

[0299] The results of the above are shown in FIGS. 7 and 8. The black circles in the figures mean that the expression of LSR was confirmed. In the normal ovarian tissue and the normal endometrial tissue, LSR was not expressed. In the ovary serous adenocarcinoma tissue, LSR was specifically expressed in 13/16 people (81%). In the ovarian clear cell adenocarcinoma surgery tissue, LSR was specifically expressed in 4/11 people (36%). In the endometrial cancer tissue, LSR was specifically expressed in 19/35 people (54%). From these results, it was found that while LSR positive patients were present in ovarian cancer patients and uterine cancer patients, a certain number of LSR negative patients were also present.

### Example 2

### Making and Evaluation

### 2.1 Making of Human LSR-Expressing Chicken Cell Strain and Immunization to Chicken

[0300] cDNA (SEQ ID NO: 7) of human LSR was cloned to a mammalian expression vector (pcDNA3.1-V5/His-TOPO) to make a LSR expression vector. This LSR expression vector encodes a fused protein in which a V5/His tag was fused to the C-terminal of the human LSR. Then, the LSR expression vector was transfected into a chicken lymphoblast-like cell strain according to an electroporation method and then 2 mg/ml of G418 was added to select an expression cell. Chicken was hyperimmunized with the obtained LSR-expressing cell strain. An antibody titer was measured by flow cytometry (FACS) analysis. With regard to the FACS analysis, the protocol of FACSCalibur (BD, USA) was followed.

2.2 Making of scFv Phage Antibody Library from Immunized Chicken Spleen

[0301] The spleen was extracted from the immunized chicken and then the lymphocytes were separated. The RNA was extracted from the obtained lymphocytes, a cDNA was synthesized, and a scFv phage antibody library was made. For the making of a scFv phage antibody library, a technique described in “Nakamura et al., J Vet Med Sci. 2004 July; 66(7): 807-14” was followed.

### 2.3 Panning Selection

[0302] The scFv phage antibody library was added to a non-LSR-expressing cell strain to carry out absorption operation of nonspecific phages, and then was reacted with a LSR-expressing cell strain. In Lot 1, a mammalian cell strain was used and in Lot 2, cell panning was carried out using the chicken lymphoblast-like cell strain used for immunization. After washing with organic solvent, phages specifically binding to the LSR-expressing cell strain were recovered and then Escherichia coli were infected with it. Panning was carried out four times and then the reactivity of the library was confirmed by FACS analysis using the LSR-expressing cell strain. Phages from a library of which the reactivity had most increased were cloned, positive clones were selected, and then the sequences of six types of clones were determined (SEQ ID NOs: 1 to 6 and FIG. 9). For cell panning, a method described in “Giordano et al., Nat Med. 2001 November; 7(11): 1249-53” was followed.

### 2.4 Recombination to Recombinant Mouse/Chicken Chimeric (IgG2a) Antibody

[0303] The VH and VL in a chicken-derived antibody gene were PCR amplified using a DNA strand encoding a scFv phage antibody as a template and then were cloned into a mouse/chicken chimeric (IgG2a) expression vector (H chain: pcDNA3.1 and L chain: pcDNA4 (Invitrogen)). The made construct of the H chain and the L chain was transfected into mammalian culture cells and then expressed antibodies (anti-LSR mouse/chicken chimeric monoclonal antibodies) were purified using Protein G Sepharose (GE). From the above, six types of clones of anti-LSR antibodies (#9-7, #16-6, No. 26-2, No. 27-6, No. 1-25, and No. 1-43) were obtained. For recombination, a technique described in “Tateishi et al., J Vet Med Sci. 2008 April; 70(4): 397-400” was followed.

### 2.5 Evaluation of Reactivity to Various Ovary Cancer Cell Strains

[0304] Using five types (#1-25, #9-7, #16-6, No. 26-2, and No. 27-6) from the anti-LSR antibodies obtained in 2.4 described above, the reactivity to various ovary cancer cell strains was investigated by FACS analysis. The results are shown in FIGS. 10 to 14. In ovary serous adenocarcinoma cell strains (OVSAHO and JHOS2) and ovarian clear cell adenocarcinoma cell strains (RGM-I and OVISE), a significant shift difference was observed by the presence or absence of the anti-LSR antibodies.

### Immunohistochemical Staining

[0305] For tissues of ovarian cancer (84) cases, the expression of LSR was analyzed by immunohistochemical staining. A primary antibody from Cloud Clone Corp. (PAD744Hu01) was used and the Dako ChemMate ENVISION Kit/HRP (DAB)-universal kit (K5007) was used to carry out staining.

[0306] Results of the immunohistochemical staining were rated with scores. The score rating was on a five-point scale: 0+(no staining cell); 1+(pale staining in any proportion of cells); 2+(darkly staining cells (<25% of area)); 3+(darkly staining cells (25 to 49% of area); and 4+(dark staining (>50% area)). Scores 0, 1, and 2 were classified as a LSR low expression group and scores 3 and 4 were classified as a LSR high expression group. They were classified into the groups of the LSR low expression group and the LSR high expression group, a survival curve was created using the Kaplan-Meier method, and a log-rank test was carried out.

[0307] Consequently, in ovary serous adenocarcinoma, it became clear that prognosis in the LSR high-expression cases was significantly worse than that in the low-expression cases (median OS: 73.8 vs 105.5 months) (p=0.0293). Meanwhile, although a significant difference is not recognized in ovarian clear cell adenocarcinoma, it was observed that prognosis in the LSR high-expression cases tended to be worse than that in the low-expression cases (median OS: 71.4 vs 87.4 months) (p=0.1362). In each of ovary serous adenocarcinoma and ovarian clear cell adenocarcinoma, the expression of LSR was examined for surgery tissues of lymph node metastasis sites and greater omentum metastasis sites according to an immunohistochemical staining method and consequently it was confirmed that LSR is expressed at cancer tissues of the metastasis sites.

[0308] As shown in FIG. 29, previously, there was no effective therapeutic method for recurrent ovarian cancer. Conventionally, there was no effective therapeutic method for recurrent ovarian cancer. The epidemiological characteristic of ovarian cancer is that ovarian cancer readily infiltrate into the surrounding by the lymph node and peritoneal metastasis or the like and advances quickly. For instance, 40% or more of ovarian cancer in Japanese patients is considered serous, 24% clear cells, 17% endometrioid, and 13% mucinous adenocarcinoma. As a 1st line of defense, cisplatin or taxol is used, and Avastin is used for recurrent ovarian cancer. However, it was considered that improvement in survival rate was not observed. Antibody pharmaceutical products approved as a therapeutic drug for cancer include those shown in the table of FIG. 29 (Carter P J Nat. Rev. Immunol. 006, May 6(5)343-357, Review). Since there is no therapeutic method for the advanced stage and the time of recurrence, ovarian cancer is presumed to be poor prognostic tumor and the development of a novel therapeutic method is presumed urgent. For example, as shown in FIG. 29, the five year survival rate in Stage IV was 31% (Japan Society of Obstetrics and Gynecology, Fujinka shuyoui iinkai houkoku [Gynecology tumor committee report], 2012, vol. 64, No. 6).

[0309] In this regard, the inventors confirmed as shown in FIG. 30 whether LSR is expressed at the ovarian cancer primary site. The protocol of it is as below. It should be noted that a technique similar to the above-mentioned technique in the present example was used in immunostaining of LSR. The expression of LSR was analyzed by immunohistochemical staining. A primary antibody from CloudClone Corp. (PAD744Hu01) was used and the Dako ChemMate ENVISION Kit/HRP (DAB)-universal kit (K5007) was used to carry out staining.

[0310] In addition, using proteins extracted from ovarian cancer surgery tissue, the expression of LSR was examined according to the Western blot method. Consequently, it became clear that LSR is more highly expressed in ovarian clear cell adenocarcinoma and ovary serous adenocarcinoma than normal ovarian tissue. GAPDH indicated a control group.

[0311] The result is shown in FIG. 30. As shown in FIG. 30, it was confirmed that LSR was expressed at the ovarian cancer primary site.

[0312] In addition, it was confirmed whether it was expressed at metastasis sites other than the primary site. The protocol of it is shown as below. It should be noted that a technique similar to the above-mentioned technique in the present example was used in immunostaining of LSR. Specifically, the expression of LSR was analyzed by immunohistochemical staining. A primary antibody from Cloud Clone Corp. (PAD744Hu01) was used and the Dako ChemMate ENVISION Kit/HRP (DAB)-universal kit (K5007) was used to carry out staining.

[0313] The results are shown in FIGS. 31 to 32. As shown in these figures, they indicate that it is also expressed at metastasis sites other than the primary site. From these facts, it is understood for the present invention that a LSR antibody medicine can be expected to exhibit an antitumor effect on not only primary ovarian cancer but also metastasis sites.

[0314] Then, for the expression of LSR, it was confirmed whether LSR is also expressed in other cells (FIGS. 33 to 35). These include expression at early ovarian clear cell adenocarcinoma, and gastric cancer and signet-ring cell cancer of gastric cancer, which are adenocarcinoma other than ovary cancer. Immunohistochemical staining of LSR was carried out according to a similar technique to the above-mentioned. Specifically, the expression of LSR was analyzed by immunohistochemical staining. A primary antibody from Cloud Clone Corp. (PAD744Hu01) was used and the Dako ChemMate ENVISION Kit/HRP (DAB)-universal kit (K5007) was used to carry out staining.

[0315] The results are shown in FIGS. 33 to 35. As shown in FIG. 33, it indicates that LSR is also expressed at early ovarian clear cell adenocarcinoma. As shown in FIG. 34, it indicates that LSR is also expressed at gastric cancer as adenocarcinoma other than ovarian cancer. In addition, as shown in FIG. 35, it indicates that LSR is also expressed at signet-ring cell cancer of gastric cancer. From these, it is understood that it can be used in the therapy for ovarian cancer even in the early stage and it has therapeutic possibility for other adenocarcinoma such as gastric cancer and the like.

[0316] Then, poor prognosis was investigated. In order to confirm whether highly-LSR-expressing ovary serous adenocarcinoma has a poor prognosis in comparison with a low expression group, the prognosis of ovary serous adenocarcinoma patients and ovarian clear cell adenocarcinoma patients was investigated based on being high or low in the expression of LSR. For ovary serous adenocarcinoma, 21 cases of strongly-LSR-expressing patients and 12 cases of weakly-expressing patients were investigated and for ovarian clear cell adenocarcinoma, 27 cases of strongly-LSR-expressing patients and 24 cases of weakly-expressing patients were investigated. The result is shown in FIG. 38. As shown in FIG. 38, it was found that the highly-LSR-expressing ovary serous adenocarcinoma has poor prognosis in comparison with the low expression group.

### (Epitope Analysis)

[0317] PepStar™ peptide microarrays were made on glass slides obtained from JPT Peptide Technologies (GmbH). Fifteen-mer overlapping peptides that overlap to the extracellular domain region of LSR by 10 amino acids were synthesized and solid-phased to glass slides. Binding of a purified recombinant antibody to a peptide was carried out according to the instructions, however, it included changes to some parts (www.jpt.com). A primary antibody was reacted at a concentration of 1.0 μg/mL and the glass slides were washed with TBST (50 mM TBS-buffer including 0.1% Tween20, pH 7.2). Then, it was reacted using Cy5-labeled goat anti-chicken IgY (Jackson Immuno Research) and washed with TBST five times and the glass slides were washed with ddH2O five times. The glass slides were dried by spraying argon gas mildly. A fluorescence signal was detected using the GenePix 4200AL scanner (Molecular Devices) at resolution of 10 μm.

[0318] The result is shown in FIG. 39. As shown in FIG. 39, it became clear that there are two types of epitopes and amino acids 116 to 135 (to which the antibodies #9-7, 1-25, 16-6, 26-2, and 1-43 correspond) and amino acids 216 to 230 (to which the antibody #27-6 corresponds) are present.

### (Cross Reaction)

[0319] In order to investigate that an anti-LSR antibody cross-reacts with mouse LSR, a mouse LSR expression vector or a control vector was transfected into COS7 cells and the reactivity with various clones of anti-LSR antibodies prepared in the present example was analyzed by FACS. The result is shown in FIG. 40. Consequently, it became clear that all the clones exhibit cross reaction with mouse LSR. The fact that an anti-LSR antibody cross-reacts with mouse LSR as described above makes it possible to use mice as an animal for a safety test. Please refer to FIG. 52 and thereafter, where actual acute toxicity tests were carried out.

### 2.6 Expression Analysis of LSR by Immunohistochemical Staining Method

[0320] Slices of paraffin-embedded tissues of ovary serous adenocarcinoma tissue and endometrial cancer tissue were deparaffinization-treated and dehydrated with alcohol. Then, using an anti-LSR antibody (#1-25 or #9-7), immunohistochemical staining for LSR was carried out according to the ABC method. The results are shown in FIGS. 15 to 17. In the ovary serous adenocarcinoma tissue and the endometrial cancer tissue, LSR was highly expressed at the tumor sites.

### Immunohistochemical Staining Using Normal Frozen Tissue Array

[0321] FDA standard human tissue microarrays (T6234701-2, Biochain) were immunohistochemically stained using the anti-LSR antibody #1-25. The expression of LSR was observed at liver and testis of various normal tissues (FIGS. 36 and 37).

### Calculation of Binding Constant

[0322] Various concentration of various anti-LSR antibodies were reacted with RMG-I cells and they were stained using goat anti-mouse IgG-FITC (Southern Biotech, Birmingham, Ala., USA) and analyzed by a FACSCanto II cytometer (Becton Dickinson). With regard to the fluorescence intensity of FITC, a KD value was analyzed using GraphPad Prism Software Version 6.0 for Windows (GraphPad Software Inc., San Diego, Calif., USA). The result is shown in FIG. 37B. When the binding ability of the made LSR antibodies was analyzed by FACS, antibodies having a high binding ability were obtained. The following analysis was carried out using two kinds of clones having the highest binding ability in them (FIG. 37B). For #9-7, K_{D}=2.52 nM; for #1-25, K_{D}=2.03 nM; for #16-6, K_{D}=2.33 nM; for #26-2, K_{D}=4.04 nM; for #27-6, K_{D}=4.29 nM; and for #1-43, K_{D}=24.62 nM.

### Cell Cycle Analysis

[0323] Ovarian clear cell adenocarcinoma (RMG-I) was seeded into a 6-well plate at 15,000 cells/well and incubated in a CO₂ incubator at 37° C. overnight. The culture supernatant was discarded and 100 μg/ml anti-LSR antibody or mouse IgG2a diluted with RPMI 1640 medium (containing 1% FBS and 1% penicillin-streptomycin) was added at 2 mL/well for each. After 96 hours, cell cycle analysis was carried out using the Cycle Test Plus DNA Reagent kits (BD Biosciences).

### Western Blot

[0324] Ovarian clear cell adenocarcinoma (RMG-I) was seeded into a 6-well plate at 15,000 cells/well and incubated in a CO₂ incubator at 37° C. overnight. The culture supernatant was discarded and 100 μg/ml anti-LSR antibody or mouse IgG2a diluted with RPMI 1640 medium (containing 1% FBS and 1% penicillin-streptomycin) was added at 2 mL/well for each. After 96 hours, proteins were extracted using a RIPA buffer (10 mM Tris-HCl, pH 7.5, 150 mM NaCl, 1% Nonidet P-40, 0.1% sodium deoxycholate, 0.1% SDS, 1× phosphatase inhibitor cocktail (Nacalai Tesque), and 1× protease inhibitor cocktail (Nacalai Tesque)) and the difference in protein expression was analyzed by the Western blot method. The following antibodies were used as primary antibodies: anti-LSR antibody (sc-133765) and anti-GAPDH antibody (sc-25778) (Santa Cruz Biotechnology (Santa Cruz, Calif.)); and anti-cyclin D1 antibody (#2926), anti-p27 antibody (#3686), anti-phospho-Rb (Ser780) antibody (#9307), anti-phospho-Rb antibody (Ser807/811) (#9308), anti-Rb antibody (#9313), anti-phospho-p44/42 MAPK (Erk1/2) (Thr202/Tyr204) antibody (#4370), anti-p44/42 MAPK (Erk1/2) antibody (#4695), anti-phospho-MEK1/2 (Ser217/221) antibody (#9154), and anti-MEK1/2 antibody (#9126) (Cell Signaling Technology).

### Example 3

### Growth Suppression of LSR Positive Malignant Tumor

[0325] 3.1 Growth Inhibition Assay with Anti-LSR Antibody

[0326] Ovarian clear cell adenocarcinoma (RMG-I) was seeded into a 96-well plate at 1000 cells/well and incubated in a CO₂ incubator at 37° C. overnight. The cell supernatant on the 96-well plate was discarded and diluted solutions (0 μg/ml, 1 μg/ml, 10 μg/ml, and 100 μg/ml) of an anti-LSR antibody (#9-7 or #1-25) were each added at 100 μL/well. After 72 hours, cell growth assay was carried out according to the WST-8 assay method. In addition, mouse IgG2 (Biolegend, Inc., 400224, MOPC-173), which is non-anti-LSR antibody, was used as a control. The results are shown in FIGS. 18 and 19. By contacting an anti-LSR antibody, the growth of ovarian cancer cells (RMG-I) was suppressed.

[0327] Ovarian clear cell adenomatous cancer (A2780) was seeded into a 96-well plate at 1000 cells/well and incubated in a CO₂ incubator at 37° C. overnight. The cell supernatant on the 96-well plate was discarded and diluted solutions (1 μg/ml, 10 μg/ml, and 100 μg/ml) of an anti-LSR antibody (#9-7 or #26-2) were each added at 100 μL/well. After 72 hours, cell growth assay was carried out according to the WST-8 assay method. In addition, mouse IgG2 (Biolegend, Inc., 400224, MOPC-173), which is non-anti-LSR antibody, was used as a control. The result is shown in FIG. 20. By contacting an anti-LSR antibody, the growth of ovarian cancer cells (A2780) was suppressed.

### Cell Cycle Analysis

[0328] Ovarian clear cell adenomatous cancer (RMG-I) was seeded into a 6-well plate at 15,000 cells/well and incubated in a CO₂ incubator at 37° C. overnight. The cell supernatant on the 6-well plate was removed and an anti-LSR antibody (#1-25) that had been diluted to a concentration of 100 μg/ml with RPMI 1640 medium (containing 1% FBS and 1% penicillin-streptomycin) was added at 2 mL/well for each. In addition, mouse IgG2 (Biolegend, Inc., 400224, MOPC-173), which is a non-anti-LSR antibody, was used as a control. Ninety six hours after the addition of the antibody, intracellular DNA was stained using the Cycle Test Plus DNA Reagent kits (BD Biosciences) and cell cycle analysis was carried out using a FACSCanto flow cytometer.

[0329] The result is shown in FIG. 41. It was recognized that by contacting the anti-LSR antibody, the S phase and the G2/M phase in the cell cycle of ovarian cancer cells (RMG-I) were significantly decreased and the G0/G1 phase was significantly increased in comparison with the control antibody-treatment group.

### Western Blot Analysis

[0330] Ovarian clear cell adenomatous cancer (RMG-I) was seeded into a 6-well plate at 15,000 cells/well and incubated in a CO₂ incubator at 37° C. overnight. The cell supernatant on the 6-well plate was removed and an anti-LSR antibody (#1-25) that had been diluted to a concentration of 100 μg/ml with RPMI 1640 medium (containing 1% FBS and 1% penicillin-streptomycin) was added at 2 mL/well for each. In addition, mouse IgG2 (Biolegend, Inc., 400224, MOPC-173), which is a non-anti-LSR antibody, was used as a control. Seventy two hours after the addition of the antibody, proteins were extracted, the expression variation of proteins related to the cell cycle was analyzed by the Western blot method using the following various antibodies: anti-cyclin D1 (#2926), anti-p27 (#3686), anti-phospho-Rb (Ser780) (#9307), anti-phospho-Rb (Ser807/811) (#9308), anti-Rb (#9313), anti-phospho-p44/42 MAPK (Erk1/2) (Thr202/Tyr204) (#4370), anti-p44/42 MAPK (Erk1/2) (#4695), anti-phospho-MEK1/2 (Ser217/221) (#9154), and anti-MEK1/2 (#9126) (Cell Signaling Technology).

[0331] The result is shown in FIG. 42. It was recognized that by contacting the anti-LSR antibody, the expression of Cyclin D1 was decreased and the expression of p27 was increased in the ovarian cancer cells (ovarian cancer cells (RMG-I)) in comparison with the control antibody. Moreover, it was recognized that the phosphorylation levels of phospho-Rb (Ser780) (#9307) and phospho-Rb (Ser807/811) were decreased. It was also recognized that the phosphorylation levels of phospho-MEK1/2 (Ser217/221) and phospho-p44/42 MAPK (Erk1/2) (Thr202/Tyr204) as kinases related to cell growth were decreased.

[0332] The above result indicates that the anti-LSR antibody directly suppressed the growth of malignant tumor cells, and it was a surprising result. As the mechanism of this, for example, it is thought that the anti-LSR antibody binds to a malignant tumor cell, thereby a cell clump of malignant tumor cells was formed, and consequently the cell division was suppressed.

### 3.2 Epitope Analysis

[0333] For the anti-LSR antibodies obtained in 2.4 described above, epitopes were analyzed as mentioned above and specifically identified. In addition, a growth suppressing effect on LSR positive malignant tumor is investigated for the anti-LSR antibodies for which the epitopes were identified. Consequently, it is understood that an anti-LSR antibody recognizing a specific epitope significantly suppresses the growth of LSR positive malignant tumor in comparison with anti-LSR antibodies recognizing other epitopes.

3.3 Growth Inhibition Assay with siRNA

[0334] Ovary serous adenocarcinoma cells (OVSAHO) were seeded into a 96-well plate at 1000 cells/well and incubated in a CO₂ incubator at 37° C. overnight. The cell supernatant on the 96-well plate was discarded and the siRNA was transfected with lipofectamine 2000. After 120 hours, cell growth assay was carried out according to the WST-8 assay method. LSR siRNA and negative control siRNA were obtained from QIAGEN. The LSR siRNA has a RNA sequence complementary to LSR mRNA (LSR siRNA 1: SEQ ID NO: 9 and LSR siRNA 2: SEQ ID NO: 10). The result is shown in FIG. 21. By contacting the LSR siRNA, the growth of ovarian cancer cells (OVSAHO) was suppressed.

### 3.4 Relation to Lipid Metabolism

[0335] It is confirmed whether the uptake of lipids (cholesterol) is elevated in stably LSR-expressing cells described in the Examples. After confirming whether the VLDL metabolism is elevated, it was confirmed whether the elevation in metabolism due to VLDL is inhibited by administration of a LSR antibody.

[0336] The protocol is shown as below.

[0337] Lipids were quantified using an empty vector strain of SKOV3 (EMP1) and a LSR-forcibly expressing strain (L45). In a low concentration, they were seeded at 5×10⁵ cells per 10 cm dish and, in a high concentration, at 5×10⁵ cells per 10 cm dish and were cultured for 48 hours. The mediums were not exchanged. By adding a methanol+chloroform mixture solution to cells suspended in PBS and centrifuging it, an organic layer as the lower layer was recovered to extract lipids. Lipids were quantified using LabAssay™ Triglyceride (GPO/DAOS method, Wako Pure Chemical Industries, Ltd.), LabAssay™ Cholesterol (cholesterol oxidase/DAOS method, Wako Pure Chemical Industries, Ltd.), and Phospholipid C-test WAKO (choline oxidase/DAOS method, Wako Pure Chemical Industries, Ltd.). The metabolism elevation due to VLDL was measured using the Extracellular Flux Analyzer XFe24 (Primetech Corporation). Assay was carried out after glucose in the buffer was removed, glutamine was added, and the antibody amount was increased from 10 ug/ml to 100 ug/ml.

[0338] Consequently, on day 1, the high was conf: 100% and the Low was 50 to 60%. On day 2, the High was 100% and the Low was 70%.

[0339] The results are shown in FIGS. 22 to 24. As shown in FIG. 22, the uptake of lipids (cholesterol) was elevated in the stably LSR-expressing cells described in the Examples. As shown in FIG. 23, the uptake of lipids (cholesterol) in high-density culture was elevated in the stably LSR-expressing cells described in the Examples. As shown in FIG. 24, although the LSR expression described in the Examples make the VLDL metabolism elevated, the elevation of metabolism due to VLDL was inhibited by administration of a LSR antibody (#9-7). In #1-25, although the inhibition of metabolism elevation was observed in some degree, the degree was less than #9-7. While not wishing to be bound by theory, this difference is believed due to the difference in epitope recognition sites depending on the clones.

### Example 4

### Analysis of Antitumor Effect in Mouse by Anti-LSR Monoclonal Antibody

[0340] An ovarian clear cell adenomatous cancer cell strain RMG-I was subcutaneously implanted to Scid mice (6-week old, female) at 1×10⁶ cells/100p1 (PBS:Matrigel=1:1). On day 14 after the implantation, the mice were divided into two groups and an anti-LSR antibody (#1-25) or an isotype control antibody (Mouse IgG2a, M7769, Sigma) was intraperitoneally administered at 10 mg/kg at a frequency of twice a week and a total of 6 times (FIG. 25). The RMG-I-implanted mice were dissected on day 25 after the start of the antibody administration, and the tumor weight was also measured. The following was calculated: tumor volume=major axis×minor axis×height.

[0341] As a result of measuring a tumor volume, a significantly inhibitory effect on tumor growth in vivo was exhibited in the anti-LSR antibody administered group relative to the control IgG administered group (FIGS. 26 to 28). A significant difference in tumor weight was also recognized.

### Example 5

### Analysis of Antitumor Effect in Mouse by Anti-LSR Monoclonal Antibody

[0342] An ovarian clear cell adenomatous cancer cell strain RMG-I was subcutaneously implanted to NOD/Scid mice (6-week old, female) at 1×10⁶ cells/100p1 (PBS:Matrigel=1:1). On day 14 after the implantation, the mice were divided into two groups and an anti-LSR antibody (#1-25) or an isotype control antibody (Mouse IgG2a, M7769, Sigma) was intraperitoneally administered at 10 mg/kg at a frequency of twice a week and a total of 6 times (FIG. 43). The RMG-I-implanted mice were dissected on day 25 after the start of the antibody administration, and the tumor weight was also measured. The following was calculated: tumor volume=major axis×minor axis×height.

[0343] As a result of measuring a tumor volume, in the NOD/Scid mice, a significantly inhibitory effect on tumor growth in vivo was exhibited in the anti-LSR antibody administered group relative to the control IgG administered group (FIG. 44). A significant difference in tumor weight was also recognized. In addition, as a result of immunohistochemically staining a tumor tissue with an anti-Ki-67 antibody, a significant decrease in the number of Ki-67 positive cell was recognized in the anti-LSR antibody administered group in comparison with the control IgG administered group. From this, it became clear that the anti-LSR antibody exhibits activity of inducing the arrest of the cell cycle in vivo (FIG. 45).

### Example 6

### Analysis of Antitumor Effect in Mouse by Anti-LSR Monoclonal Antibody

[0344] SKOV3-L45 in which a LSR negative ovary serous adenocarcinoma cell strain SKOV3 was made stably express LSR, or SKOV3-E1 into which an empty vector had been gene-transferred was subcutaneously implanted to Scid mice (6-week old, female) at 5×10⁵ cells/100p1 (PBS:Matrigel=1:1). On day 14 after the implantation, the mice were divided into two groups and an anti-LSR antibody (#1-25) or an isotype control antibody (Mouse IgG2a, M7769, Sigma) was intraperitoneally administered at 10 mg/kg at a frequency of every other day and a total of 8 times (FIG. 46). The mice were dissected on day 18 after the start of the antibody administration, and the tumor weight was also measured. The following was calculated: tumor volume=major axis×minor axis×height.

[0345] As a result of measuring a tumor volume, in the SKOV3-L45-implanted Scid mice, a significantly inhibitory effect on tumor growth in vivo was exhibited in the anti-LSR antibody administered group relative to the control IgG administered group (FIG. 47). Meanwhile, in the tumor volume of the mice into which the LSR negative SKOV3-E1 had been implanted, a significant difference was not recognized (FIG. 47). A similar result was also obtained in tumor weight (FIG. 48). From this, it was suggested that in order for an anti-LSR antibody to exhibit an antitumor effect, it is necessary that LSR is expressed at tumor cells.

[0346] Tumors of the SKOV3-L45-implanted Scid mice and the SKOV3-E1-implanted Scid mice were extracted and fat droplets were observed by electronmicroscopy. Consequently, in the SKOV3-L45-implanted tissue, many accumulations of fat droplets were recognized in comparison with the SKOV3-E1-implanted tumor tissue (FIG. 49). In the stably LSR-expressing cell strain and the control-vector-expressing cell strain, when fat droplets after the VLDL administration were compared, it was recognized that fat droplets in the LSR-expressing cell strain are larger and the number thereof is greater.

[0347] In order to investigate that an anti-LSR antibody binds to LSR and exhibits activity of internalizing in a cell, an antibody labeling was prepared using CypHer 5E mono NHS ester dye (GE Healthcare) and was used in an assay. A LSR positive cell strain SKOV3-L45 cell strain and a LSR negative cell strain SKOV3-E1 and a CypHer 5E-labeled antibody were incubated for 3 hours and they were observed by the In cell analyzer 2000. Consequently, all the clones of #9-7, #1-25, #16-6, #26-2, and #27-6 exhibited activity of internalizing (FIGS. 50 and 52). FIG. 50 shows that if an anticancer agent is conjugated to an antibody, it is applicable as an antibody-drug conjugate (ADC). FIG. 51 shows that if an anticancer agent is conjugated to an antibody, it is applicable as an antibody-drug conjugate (ADC).

[0348] These experiments were carried out as below. Tumor tissues were extracted from subcutaneously-RMG-I-implanted NOD/SCID mice to which a control antibody or the anti-LSR antibody #1-25 has been administered. From the tumor tissues, formalin fixed paraffin embedded blocks were made and the expression of Ki67 was analyzed by immunohistochemical staining. A primary antibody from Leica Biosystems Inc. (NCL-L-Ki67-MM1) was used and staining was carried out using the Dako ChemMate ENVISION Kit/HRP (DAB)-universal kit (K5007). As a result of calculating the proportion of Ki-67 positive cells in the respective visual fields, a significant decrease in the proportion of Ki-67 positive cells was recognized in the anti-LSR antibody #1-25 administered group in comparison with the control antibody administered group. From this, it was suggested that by administering the anti-LSR antibody #1-25, the cell cycle arrest is also induced in vivo.

### Example 7

### Safety Test

[0349] Then, a safety test was carried out for an antibody of the present invention. Since the anti-LSR antibody #1-25 also exhibits cross reaction with mouse LSR, an acute toxicity test in the case of administration to a mouse was carried out. One mg of Mouse IgG2a (Sigma, M7769) or the anti-LSR antibody #1-25 was intraperitoneally administered to each of male and female C57BL/6J(8w) mice, the mice were dissected on day 7, the brain, heart, kidney, liver, lung, and spleen were extracted, and pathological analysis by HE staining was carried out. In addition, the blood was collected and analyzed using an automated blood cell counting device (VetScan HMII) and a biochemical blood analyzer for animal (VetScan V52) (FIG. 52). Consequently, in the data of blood cell number, any significant change was not recognized in the both (FIGS. 53 and 54). Similarly, in the blood biochemical data, any significant change was not recognized in the both (FIGS. 55 and 56). From this, it is understood that the anti-LSR antibody #1-25 has low toxicity and high safety.

[0350] The above Examples 1 to 4 show the following: (i) on contacting an anti-LSR antibody with malignant tumor cells, the growth of the malignant tumor cells is suppressed; (ii) on making a LSR antagonist act on malignant tumor cells, the growth of the malignant tumor cells is suppressed; (iii) by administering an anti-LSR antibody to a malignant tumor patient, the therapy for malignant tumor can be carried out; (vi) while LSR positive patients were present in malignant tumor patients, a certain number of LSR negative patients were also present; (v) in malignant tumor therapy in which LSR is targeted, it is important to diagnose whether LSR positive is present or absent in a malignant tumor patient before the therapy; and the like.

[0351] As above, the present invention is described based on the examples. These examples are only illustrations and those skilled in the art will understand that various variations are possible and such variations also fall within the scope of the present invention.

[0352] As described above, the present invention is illustrated by preferable embodiments of the present invention. However, it will be understood that the scope of the present invention should be interpreted only by the claims. It will be understood that the contents of patents, patent applications, and literatures cited in the present specification should be incorporated by reference to the present specification as if their contents per se are specifically described in the present specification. The present application claims priority to Japanese Patent Application No. 2013-272084 (filed on Dec. 27, 2013) and it is understood that with regard to the contents of them, its contents should be incorporated by reference to the present specification as if its contents per se is specifically described in the present specification.

### INDUSTRIAL APPLICABILITY

[0353] Malignant tumor markers and malignant tumor control technologies are provided and technologies applicable in industries (reagents, medicine manufacture, and the like) involved in technologies related to diagnosis, therapy, and prophylaxis of malignant tumor are provided.

### SEQUENCE LISTING FREE TEXT

[0354] SEQ ID NO: 1: the anti-LSR antibody 9-7 sequence

[0355] SEQ ID NO: 2: the anti-LSR antibody 16-6 sequence

[0356] SEQ ID NO: 3: the anti-LSR antibody 26-2 sequence

[0357] SEQ ID NO: 4: the anti-LSR antibody 27-6 sequence

[0358] SEQ ID NO: 5: the anti-LSR antibody 1-25 sequence

[0359] SEQ ID NO: 6: the anti-LSR antibody 1-43 sequence

[0360] SEQ ID NO: 7: human LSR protein sequence (NP_991403.1)

[0361] SEQ ID NO: 8: human LSR nucleic acid sequence (NM_205834.3)

[0362] SEQ ID NO: 9: the core sequence (guide sequence) of LSR siRNA 1

[0363] SEQ ID NO: 10: the core sequence (guide sequence) of LSR siRNA 2

[0364] SEQ ID NO: 11: the antisense sequence of the core sequence (guide sequence) of LSR siRNA 1

[0365] SEQ ID NO: 12: the antisense sequence of the core sequence (guide sequence) of LSR siRNA 2

[0366] SEQ ID NO: 13: the sense full length sequence of LSR siRNA 1

[0367] SEQ ID NO: 14: the sense full length sequence of LSR siRNA 2

[0368] SEQ ID NO: 15: the antisense full length sequence of LSR siRNA 1

[0369] SEQ ID NO: 16: the antisense full length sequence of LSR siRNA 2

[0370] SEQ ID NO: 17: LSR forward primer sequence

[0371] SEQ ID NO: 18: LSR reverse primer sequence

[0372] SEQ ID NO: 19: β-actin forward primer sequence

[0373] SEQ ID NO: 20: β-actin forward primer sequence

1. A method of treating or preventing a malignant tumor, comprising administering an effective amount of a suppressant of an LSR (lipolysis stimulated lipoprotein receptor) to a subject, wherein the suppressant comprises an anti-LSR (lipolysis stimulated lipoprotein receptor) antibody or an antigen binding fragment or a functional equivalent thereof.

2-4. (canceled)

5. The method of claim 1, wherein the malignant tumor is an LSR positive malignant tumor.

6. The method of claim 1, comprising administering the suppressant to the subject wherein the subject is a patient determined to have an episode of LSR positive malignant tumor.

7. The method of claim 1, comprising administering the suppressant to the subject wherein the subject is a patient among malignant tumor patients whose malignant tumor has been determined to be LSR positive malignant tumor.

8. The method of claim 1, wherein the anti-LSR antibody is an anti-LSR antibody that specifically binds to an epitope of the LSR and/or an antibody having an ability to inhibit exacerbation due to a VLDL.

9. (canceled)

10. The method of claim 1, wherein the anti-LSR antibody is one or more antibodies selected from the group consisting of:
(a) an antibody with heavy chain CDRs 1, 2, and 3 and light chain CDRs 1, 2, and 3 comprising amino acid sequences set forth in positions 31-35, 50-66, 99-104, 153-165, 182-188 and 221-230 of SEQ ID NO: 1, respectively;
(b) an antibody with heavy chain CDRs 1, 2, and 3 and light chain CDRs 1, 2, and 3 comprising amino acid sequences set forth in positions 31-35, 50-66, 99-103, 152-165, 182-188 and 221-230 of SEQ ID NO: 2, respectively;
(c) an antibody with heavy chain CDRs 1, 2, and 3 and light chain CDRs 1, 2, and 3 comprising amino acid sequences set forth in positions 31-35, 50-66, 99-104, 153-165, 182-188 and 221-229 of SEQ ID NO: 3, respectively;
(d) an antibody with heavy chain CDRs 1, 2, and 3 and light chain CDRs 1, 2, and 3 comprising amino acid sequences set forth in positions 31-35, 50-66, 99-104, 153-165, 182-188 and 221-229 of SEQ ID NO: 4, respectively;
(e) an antibody with heavy chain CDRs 1, 2, and 3 and light chain CDRs 1, 2, and 3 comprising amino acid sequences set forth in positions 31-35, 50-66, 99-104, 153-165, 182-188 and 221-229 of SEQ ID NO: 5, respectively; and
(f) an antibody with heavy chain CDRs 1, 2, and 3 and light chain CDRs 1, 2, and 3 comprising amino acid sequences set forth in positions 31-35, 50-66, 99-104, 153-165, 182-188 and 221-229 of SEQ ID NO: 6, respectively,
or a mutant of the antibody, which is free of a mutation in the CDRs but comprises one or several substitutions, additions, or deletions in a framework of the antibody in the mutant.

11-13. (canceled)

14. The method of claim 10, wherein the anti-LSR antibody is an antibody selected from a monoclonal antibody, polyclonal antibody, chimeric antibody, humanized antibody, human antibody, multifunctional antibody, bispecific or oligospecific antibody, single chain antibody, scFV, diabody, sc(Fv)₂ (single chain (Fv)₂), and scFv-Fc.

15. The method of claim 1, wherein the anti-LSR antibody has positions 116-134 and/or 216-230 of SEQ ID NO: 7 as an epitope.

16. The method of claim 1, wherein the malignant tumor comprises ovarian cancer or metastasized ovarian cancer.

17. The method of claim 16, wherein the ovarian cancer is recurrent ovarian cancer or early-stage ovarian cancer.

18. (canceled)

19. The method of claim 1, wherein the malignant tumor comprises ovarian cancer, pancreatic cancer, lung cancer, gastric cancer, or colon cancer.

20. (canceled)

21. The method of claim 16, wherein the ovarian cancer is ovarian serous adenocarcinoma or ovarian clear cell adenocarcinoma.

22-23. (canceled)

24. The companion diagnostic method of claim 25, wherein inspecting comprises contacting the sample with an LSR detection agent, wherein the LSR detection agent comprises an anti-LSR antibody or an antigen binding fragment or a functional equivalent thereof.

25. A companion diagnostic method for malignant tumor therapy targeting an LSR, comprising inspecting whether a malignant tumor sample of a malignant tumor patient is LSR positive.

26. An antibody or antibodies selected from the group consisting of:
(a) an antibody with heavy chain CDRs 1, 2, and 3 and light chain CDRs 1, 2, and 3 comprising amino acid sequences set forth in positions 31-35, 50-66, 99-104, 153-165, 182-188 and 221-230 of SEQ ID NO: 1, respectively;
(b) an antibody with heavy chain CDRs 1, 2, and 3 and light chain CDRs 1, 2, and 3 comprising amino acid sequences set forth in positions 31-35, 50-66, 99-103, 152-165, 182-188 and 221-230 of SEQ ID NO: 2, respectively;
(c) an antibody with heavy chain CDRs 1, 2, and 3 and light chain CDRs 1, 2, and 3 comprising amino acid sequences set forth in positions 31-35, 50-66, 99-104, 153-165, 182-188 and 221-229 of SEQ ID NO: 3, respectively;
(d) an antibody with heavy chain CDRs 1, 2, and 3 and light chain CDRs 1, 2, and 3 comprising amino acid sequences set forth in positions 31-35, 50-66, 99-104, 153-165, 182-188 and 221-229 of SEQ ID NO: 4, respectively;
(e) an antibody with heavy chain CDRs 1, 2, and 3 and light chain CDRs 1, 2, and 3 comprising amino acid sequences set forth in positions 31-35, 50-66, 99-104, 153-165, 182-188 and 221-229 of SEQ ID NO: 5, respectively; and
(f) an antibody with heavy chain CDRs 1, 2, and 3 and light chain CDRs 1, 2, and 3 comprising amino acid sequences set forth in positions 31-35, 50-66, 99-104, 153-165, 182-188 and 221-229 of SEQ ID NO: 6, respectively,
or a mutant of the antibody, which is free of a mutation in the CDRs but comprises one or several substitutions, additions, or deletions in a framework of the antibody in the mutant.

27. The antibody or the mutant of the antibody of claim 26, wherein the anti-LSR antibody is an antibody selected from a monoclonal antibody, polyclonal antibody, chimeric antibody, humanized antibody, human antibody, multifunctional antibody, bispecific or oligospecific antibody, single chain antibody, scFV, diabody, sc(Fv)₂ (single chain (Fv)₂), and scFv-Fc.

28. An anti-LSR antibody or an antigen binding fragment thereof having positions 216-230 of SEQ ID NO: 7 as an epitope.

29-30. (canceled)

31. The method of claim 1, further comprising administering a cell-killing agent.

32-43. (canceled)

44. A method of determining poor prognosis for malignant tumor therapy, comprising measuring an expression level of an LSR (lipolysis stimulated lipoprotein receptor) by binding an LSR binding agent to the LSR, wherein the LSR binding agent comprises an anti-LSR (lipolysis stimulated lipoprotein receptor) antibody or an antigen binding fragment or a functional equivalent thereof.

45-46. (canceled)

The application's sequence listing, which the Patent Office published only in electronic form, follows.

SEQUENCE LISTING (1996 sequences)

SEQ ID NO: 1 - DNA, 35 bp, artificial sequence
  BSL-18E  primer
  misc_feature (35)..(35): n is a, c, g, t or u
aaagcggccgcatgcttttttttttttttttttvn

SEQ ID NO: 2 - DNA, 20 bp, artificial sequence
  P20EA  primer
taatacgactccgaattccc

SEQ ID NO: 3 - DNA, 10 bp, artificial sequence
  P10EA  primer
gggaattcgg

SEQ ID NO: 4 - DNA, 20 bp, artificial sequence
  B-P20EA  primer
  modified_base (1)..(1): Adaptor B is attached
taatacgactccgaattccc

SEQ ID NO: 5 - DNA, 19 bp, artificial sequence
  CM1  primer
tcctgtgcgaggcagccaa

SEQ ID NO: 6 - DNA, 20 bp, artificial sequence
  CM2  primer
gtatccgacggggaattctc

SEQ ID NO: 7 - DNA, 19 bp, artificial sequence
  CM3GS  primer
  modified_base (1)..(1): Adaptor A-key-MID1 is attached
aaagggttggggcggatgc

SEQ ID NO: 8 - DNA, 20 bp, artificial sequence
  CA1  primer
gctggctgctcgtggtgtac

SEQ ID NO: 9 - DNA, 21 bp, artificial sequence
  CA2  primer
gggaagtttctggcggtcacg

SEQ ID NO: 10 - DNA, 20 bp, artificial sequence
  CA3-GS  primer
  modified_base (1)..(1): Adaptor A-key-MID2 is attached
ccgctttcgctccaggtcac

SEQ ID NO: 11 - DNA, 21 bp, artificial sequence
  CG1  primer
caccttggtgttgctgggctt

SEQ ID NO: 12 - DNA, 21 bp, artificial sequence
  CG2  primer
tcctgaggactgtaggacagc

SEQ ID NO: 13 - DNA, 21 bp, artificial sequence
  CG3-GS  primer
  modified_base (1)..(1): Adaptor A-key-MID3 is attached
tgagttccacgacaccgtcac

SEQ ID NO: 14 - DNA, 20 bp, artificial sequence
  CD1  primer
gtcccgtctttgtatctcag

SEQ ID NO: 15 - DNA, 18 bp, artificial sequence
  CD2  primer
tctgtgtccccatgtacc

SEQ ID NO: 16 - DNA, 19 bp, artificial sequence
  CD3-GS  primer
  modified_base (1)..(1): Adaptor A-key-MID4 is attached
cccagttatcaagcatgcc

SEQ ID NO: 17 - DNA, 18 bp, artificial sequence
  CE1  primer
catagtgaccagagagcg

SEQ ID NO: 18 - DNA, 19 bp, artificial sequence
  CE2  primer
gtggctggtaaggtcatag

SEQ ID NO: 19 - DNA, 20 bp, artificial sequence
  CE3-GS  primer
  modified_base (1)..(1): Adaptor A-key-MID5 is attached
cattggagggaatgtttttg

SEQ ID NO: 20 - protein, 17 aa, Homo sapiens
  IGHV4-59 and IGHJ4 and IGHD1-7
CARVVGNWNYEWIFDNW

SEQ ID NO: 21 - protein, 14 aa, Homo sapiens
  IGHV3-30-3 and IGHJ3 and IGHD5-12
CARMYRRVYGFDAW

SEQ ID NO: 22 - protein, 16 aa, Homo sapiens
  IGHV1-18 and IGHJ4 and IGHD2-21
CARRHYGDRGYYFDIW

SEQ ID NO: 23 - protein, 20 aa, Homo sapiens
  IGHV1-2 and IGHJ3 and IGHD6-13
CVRDRLPSWAAAGKDSFGLW

SEQ ID NO: 24 - protein, 24 aa, Homo sapiens
  IGHV4-34 and IGHJ6 and IGHD3-10
CARGRKLPVRGVRGMFYYYGVDVW

SEQ ID NO: 25 - protein, 24 aa, Homo sapiens
  IGHV4-39 and IGHJ6 and IGHD6-19
CARQIVRNSGWYVAWYNYYLLDLW

SEQ ID NO: 26 - protein, 25 aa, Homo sapiens
  IGHV4-59 and IGHJ3 and IGHD3-22
CARQSLYRIYYSDSSGYRLDAFDIW

SEQ ID NO: 27 - protein, 14 aa, Homo sapiens
  IGHV3-23 and IGHJ4 and IGHD3-10
CAKYLMILGHFDIW

SEQ ID NO: 28 - protein, 15 aa, Homo sapiens
  IGHV2-70 and IGHJ4 and IGHD6-13
CARLLGSGWYHFDKW

SEQ ID NO: 29 - protein, 22 aa, Homo sapiens
  IGHV1-69 and IGHJ4 and IGHD5-24
CARGRPSRDGYRPPMYYFLDYW

SEQ ID NO: 30 - protein, 17 aa, Homo sapiens
  IGHV3-21 and IGHJ3 and IGHD2-2
CARGCSANCPTVAFDLW

SEQ ID NO: 31 - protein, 17 aa, Homo sapiens
  IGHV3-23 and IGHJ5 and IGHD6-19
CAKDRGNSGWWSWLDPW

SEQ ID NO: 32 - DNA, 35 bp, artificial sequence; identical to SEQ ID NO: 1
  BSL-18E  primer
  misc_feature (35)..(35): n is a, c, g, t or u

SEQ ID NO: 33 - DNA, 20 bp, artificial sequence
  P20EA  primer
taatacgactccgaattccc

SEQ ID NO: 34 - DNA, 10 bp, artificial sequence
  P10EA  primer
gggaattcgg

SEQ ID NO: 35 - DNA, 23 bp, artificial sequence
  CA1  primer
tgttgaaggcgtttgcacatgca

SEQ ID NO: 36 - DNA, 23 bp, artificial sequence
  CA2  primer
gtgcatagacctcatgtctagca

SEQ ID NO: 37 - DNA, 23 bp, artificial sequence
  CB1  primer
gaactggacttgacagcggaact

SEQ ID NO: 38 - DNA, 23 bp, artificial sequence
  CB2  primer
aggcagtatctggagtcattgag

SEQ ID NO: 39 - DNA, 26 bp, artificial sequence
  A adaptor
ccatctcatccctgcgtgtctccgac

SEQ ID NO: 40 - DNA, 63 bp, artificial sequence
  HuVaF-02  primer
ccatctcatccctgcgtgtctccgactcagacgagtgcgtataggcagacagacttgtcactg

SEQ ID NO: 41 - DNA, 63 bp, artificial sequence
  HuVaF-02  primer
ccatctcatccctgcgtgtctccgactcagacgctcgacaataggcagacagacttgtcactg

SEQ ID NO: 42 - DNA, 63 bp, artificial sequence
  HuVaF-03  primer
ccatctcatccctgcgtgtctccgactcagagacgcactcataggcagacagacttgtcactg

SEQ ID NO: 43 - DNA, 63 bp, artificial sequence
  HuVaF-04  primer
ccatctcatccctgcgtgtctccgactcagagcactgtagataggcagacagacttgtcactg

SEQ ID NO: 44 - DNA, 63 bp, artificial sequence
  HuVaF-05  primer
ccatctcatccctgcgtgtctccgactcagatcagacacgataggcagacagacttgtcactg

SEQ ID NO: 45 - DNA, 63 bp, artificial sequence
  HuVaF-06  primer
ccatctcatccctgcgtgtctccgactcagatatcgcgagataggcagacagacttgtcactg

SEQ ID NO: 46 - DNA, 63 bp, artificial sequence
  HuVaF-07  primer
ccatctcatccctgcgtgtctccgactcagcgtgtctctaataggcagacagacttgtcactg

SEQ ID NO: 47 - DNA, 63 bp, artificial sequence
  HuVaF-08  primer
ccatctcatccctgcgtgtctccgactcagctcgcgtgtcataggcagacagacttgtcactg

SEQ ID NO: 48 - DNA, 63 bp, artificial sequence
  HuVaF-09  primer
ccatctcatccctgcgtgtctccgactcagtctctatgcgataggcagacagacttgtcactg

SEQ ID NO: 49 - DNA, 63 bp, artificial sequence
  HuVaF-10  primer
ccatctcatccctgcgtgtctccgactcagtgatacgtctataggcagacagacttgtcactg

SEQ ID NO: 50 - DNA, 63 bp, artificial sequence
  HuVbF-01  primer
ccatctcatccctgcgtgtctccgactcagatacgacgtaacaccagtgtggccttttgggtg

SEQ ID NO: 51 - DNA, 63 bp, artificial sequence
  HuVbF-02  primer
ccatctcatccctgcgtgtctccgactcagtcacgtactaacaccagtgtggccttttgggtg

SEQ ID NO: 52 - DNA, 63 bp, artificial sequence
  HuVbF-03  primer
ccatctcatccctgcgtgtctccgactcagcgtctagtacacaccagtgtggccttttgggtg

SEQ ID NO: 53 - DNA, 63 bp, artificial sequence
  HuVbF-04  primer
ccatctcatccctgcgtgtctccgactcagtctacgtagcacaccagtgtggccttttgggtg

SEQ ID NO: 54 - DNA, 63 bp, artificial sequence
  HuVbF-05  primer
ccatctcatccctgcgtgtctccgactcagtgtactactcacaccagtgtggccttttgggtg

SEQ ID NO: 55 - DNA, 63 bp, artificial sequence
  HuVbF-06  primer
ccatctcatccctgcgtgtctccgactcagacgactacagacaccagtgtggccttttgggtg

SEQ ID NO: 56 - DNA, 63 bp, artificial sequence
  HuVbF-07  primer
ccatctcatccctgcgtgtctccgactcagcgtagactagacaccagtgtggccttttgggtg

SEQ ID NO: 57 - DNA, 63 bp, artificial sequence
  HuVbF-08  primer
ccatctcatccctgcgtgtctccgactcagtacgagtatgacaccagtgtggccttttgggtg

SEQ ID NO: 58 - DNA, 63 bp, artificial sequence
  HuVbF-09  primer
ccatctcatccctgcgtgtctccgactcagtactctcgtgacaccagtgtggccttttgggtg

SEQ ID NO: 59 - DNA, 63 bp, artificial sequence
  HuVbF-10  primer
ccatctcatccctgcgtgtctccgactcagtagagacgagacaccagtgtggccttttgggtg

SEQ ID NO: 60 - DNA, 46 bp, artificial sequence
  B-P20EA  primer
cctatcccctgtgtgccttggcagtctaatacgactccgaattccc

SEQ ID NO: 61 - protein, 26 aa, Homo sapiens
  IGHD2-21  CDR3 amino acids
CAKDMCGLWASCGGDCYSRRTTSLTT

SEQ ID NO: 62 - protein, 26 aa, Homo sapiens
  IGHD2-21  CDR3 amino acids
CAKDMCGLWASCGGDCYSRRTASLTT

SEQ ID NO: 63 - protein, 21 aa, Homo sapiens
  IGHD2-21  CDR3 amino acids
CARGPNMAFVVVTAILMLLIS

SEQ ID NO: 64 - protein, 23 aa, Homo sapiens
  IGHD2-21  CDR3 amino acids
CARAPDCGGSTCYSHPYYGMDVW

SEQ ID NO: 65 - protein, 20 aa, Homo sapiens
  IGHD2-21  CDR3 amino acids
CARSHIVVVTAIPLEMLLIS

SEQ ID NO: 66 - protein, 23 aa, Homo sapiens
  IGHD2-21  CDR3 amino acids
CARDPRIVVVAPATHTPTTVWTS

SEQ ID NO: 67 - protein, 15 aa, Homo sapiens
  IGHD6-13  CDR3 amino acids
CGRSRHSSSWQILTP

SEQ ID NO: 68 - protein, 15 aa, Homo sapiens
  IGHD6-13  CDR3 amino acids
CANGGLAAAGDHLTT

SEQ ID NO: 69 - protein, 16 aa, Homo sapiens
  IGHD6-13  CDR3 amino acids
CALCPTPIAAAGSVTT

SEQ ID NO: 70 - protein, 19 aa, Homo sapiens
  IGHD6-13  CDR3 amino acids
CARAPSIPVAGIGYHFDHW

SEQ ID NO: 71 - protein, 17 aa, Homo sapiens
  IGHD6-13  CDR3 amino acids
CALCPNPYSSGWFCNYW

SEQ ID NO: 72 - protein, 18 aa, Homo sapiens
  IGHD6-13  CDR3 amino acids
CARAPSIPVAGIATTLTT

SEQ ID NO: 73 - protein, 16 aa, Homo sapiens
  IGHD3-3  CDR3 amino acids
CIYDFWSGGPHPTLTT

SEQ ID NO: 74 - protein, 17 aa, Homo sapiens
  IGHD3-3  CDR3 amino acids
CARIVNTEGFWSGFLTP

SEQ ID NO: 75 - protein, 14 aa, Homo sapiens
  IGHD3-3  CDR3 amino acids
CTRRGGVVIICLTT

SEQ ID NO: 76 - protein, 18 aa, Homo sapiens
  IGHD3-3  CDR3 amino acids
CIHTGNDFWTGTNYGLTS

SEQ ID NO: 77 - protein, 17 aa, Homo sapiens
  IGHD3-3  CDR3 amino acids
CARIVNTEGFGVVFLTP

SEQ ID NO: 78 - protein, 23 aa, Homo sapiens
  IGHD3-3  CDR3 amino acids
CAKDRFSGRGRFEFMEWLTPLTT

SEQ ID NO: 79 - protein, 22 aa, Homo sapiens
  IGHD3-3  CDR3 amino acids
CAKDRFSEGKVQFMEWLTPLTT

SEQ ID NO: 80 - protein, 20 aa, Homo sapiens
  IGHD3-22  CDR3 amino acids
CARRPIPPLTMRVVVIPLTS

SEQ ID NO: 81 - protein, 17 aa, Homo sapiens
  IGHD3-22  CDR3 amino acids
CARDPPMPMIVVQTLTT

SEQ ID NO: 82 - protein, 17 aa, Homo sapiens
  IGHD3-22  CDR3 amino acids
CARDPPMPMILVQTLTT

SEQ ID NO: 83 - protein, 19 aa, Homo sapiens
  IGHD3-22  CDR3 amino acids
CAKILITMILVVSLMLLIS

SEQ ID NO: 84 - protein, 23 aa, Homo sapiens
  IGHD3-10  CDR3 amino acids
CAREIRGTTMVRELTTSTATWTP

SEQ ID NO: 85 - protein, 23 aa, Homo sapiens
  IGHD3-10  CDR3 amino acids
CVRTYYFGLGDIITEITSTVWTS

SEQ ID NO: 86 - protein, 18 aa, Homo sapiens
  IGHD3-10  CDR3 amino acids
CATYYYGSGSAGHNFDYW

SEQ ID NO: 87 - protein, 15 aa, Homo sapiens
  IGHD3-10  CDR3 amino acids
CARRTYYYGSTNLTT

SEQ ID NO: 88 - protein, 20 aa, Homo sapiens
  IGHD3-10  CDR3 amino acids
CARMVTDYYGSGNRGWFDPW

SEQ ID NO: 89 - protein, 24 aa, Homo sapiens
  IGHD3-10  CDR3 amino acids
CARGPGLSVMIRGVITTPNHILIT

SEQ ID NO: 90 - protein, 13 aa, Homo sapiens
  IGHD3-10  CDR3 amino acids
CARDYYGSGVMTL

SEQ ID NO: 91 - protein, 22 aa, Homo sapiens
  IGHD2-15  CDR3 amino acids
CARAPDCGGGTCYSHPTTVWTS

SEQ ID NO: 92 - protein, 22 aa, Homo sapiens
  IGHD2-15  CDR3 amino acids
CARARIVVVVPATLTPTTVWTS

SEQ ID NO: 93 - protein, 23 aa, Homo sapiens
  IGHD2-15  CDR3 amino acids
CARAPDCGGGTCYSHPYYGMDVW

SEQ ID NO: 94 - protein, 26 aa, Homo sapiens
  IGHD2-15  CDR3 amino acids
CAKDLAPLKSCSRGGCYPYYYGLDIW

SEQ ID NO: 95 - protein, 18 aa, Homo sapiens
  IGHD1-26  CDR3 amino acids
CARGPATAILGATPSLTP

SEQ ID NO: 96 - protein, 14 aa, Homo sapiens
  IGHD1-26  CDR3 amino acids
CARDDSASYSRGTT

SEQ ID NO: 97 - protein, 18 aa, Homo sapiens
  IGHD1-26  CDR3 amino acids
CVRHDYSDNDLSTNWFGP

SEQ ID NO: 98 - protein, 9 aa, Homo sapiens
  IGHD5-5  CDR3 amino acids
CMGPGDTAI

SEQ ID NO: 99 - protein, 18 aa, Homo sapiens
  IGHD5-5  CDR3 amino acids
CARRPREMESAMVLSLTT

SEQ ID NO: 100 - protein, 25 aa, Homo sapiens
  IGHD3-9  CDR3 amino acids
CAHSAPYYDILSRNRARSWKDFDNW

SEQ ID NO: 101 - protein, 24 aa, Homo sapiens
  IGHD3-9  CDR3 amino acids
CAHSAPIMIFCLVTAHEVGRILTT

SEQ ID NO: 102 - protein, 16 aa, Homo sapiens
  IGHD3-9  CDR3 amino acids
CATVALLRYFDWSSTR

SEQ ID NO: 103 - protein, 26 aa, Homo sapiens
  IGHD6-19  CDR3 amino acids
CARGRRSLPAIVYSSGPDRPNWFDPW

SEQ ID NO: 104 - protein, 20 aa, Homo sapiens
  IGHD6-19  CDR3 amino acids
CTSAAVASSSGWPLRGVWTS

SEQ ID NO: 105 - protein, 19 aa, Homo sapiens
  IGHD2-2  CDR3 amino acids
CARAPLCSSASCHLQLDYW

SEQ ID NO: 106 - protein, 16 aa, Homo sapiens
  IGHD4-23  CDR3 amino acids
CARGAGYGGNSGVRTT

SEQ ID NO: 107 - protein, 12 aa, Homo sapiens
  IGHD4-17  CDR3 amino acids
CARTLYGDFVDF

SEQ ID NO: 108 - protein, 20 aa, Homo sapiens
  IGHD3-16  CDR3 amino acids
CAKGVLSSGGVIATLPGSTP

SEQ ID NO: 109 - protein, 13 aa, Homo sapiens
  IGHD3-16  CDR3 amino acids
CARGFGARGVILT

SEQ ID NO: 110 - protein, 25 aa, Homo sapiens
  IGHD2-8  CDR3 amino acids
CANVGGADRNYCINGVRHNPNYLTT

SEQ ID NO: 111 - protein, 17 aa, Homo sapiens
  IGHD5-12  CDR3 amino acids
CARHVNGYDYLFPFTSW

SEQ ID NO: 112 - protein, 17 aa, Homo sapiens
  IGHD1-1  CDR3 amino acids
CARGGSQLERRRPLVTT

SEQ ID NO: 113 - protein, 12 aa, Homo sapiens
  IgA  CDR3 amino acids
CARETVGGTLTT

SEQ ID NO: 114 - protein, 18 aa, Homo sapiens
  IgA  CDR3 amino acids
CARISSGHDPPIITGWTS

SEQ ID NO: 115 - protein, 18 aa, Homo sapiens
  IgA  CDR3 amino acids
CAKGHQVRLRGRTGTSIS

SEQ ID NO: 116 - protein, 19 aa, Homo sapiens
  IgA  CDR3 amino acids
CARSPIWFGSHRFTTTWRS

SEQ ID NO: 117 - protein, 15 aa, Homo sapiens
  IgA  CDR3 amino acids
CARDPLETGATSLII

SEQ ID NO: 118 - protein, 20 aa, Homo sapiens
  IgA  CDR3 amino acids
CAKLGNRPGFTEWDHWFGPW

SEQ ID NO: 119 - protein, 22 aa, Homo sapiens
  IgA  CDR3 amino acids
CAGAPDCGVGAAPLTSTTVCTS

SEQ ID NO: 120 - protein, 15 aa, Homo sapiens
  IgA  CDR3 amino acids
CVRDPHETGATTLIT

SEQ ID NO: 121 - protein, 17 aa, Homo sapiens
  IgA  CDR3 amino acids
CARIRKEVGAPPITWTS

SEQ ID NO: 122 - protein, 16 aa, Homo sapiens
  IgA  CDR3 amino acids
CARGSWSGAAFYSLTT

SEQ ID NO: 123 - protein, 16 aa, Homo sapiens
  IgA  CDR3 amino acids
CARDPNKFRTNHLSTT

SEQ ID NO: 124 - protein, 18 aa, Homo sapiens
  IgA  CDR3 amino acids
CAGIGGATSTTTTTTWTS

SEQ ID NO: 125 - protein, 20 aa, Homo sapiens
  IgA  CDR3 amino acids
CATVPELTDISLPRLMALIS

SEQ ID NO: 126 - protein, 12 aa, Homo sapiens
  IgA  CDR3 amino acids
CARVWGKHTLTT

SEQ ID NO: 127 - protein, 16 aa, Homo sapiens
  IgA  CDR3 amino acids
CARRAAPHDYGHVLIF

SEQ ID NO: 128 - protein, 16 aa, Homo sapiens
  IgA  CDR3 amino acids
CARDPNKFRPNHLSTT

SEQ ID NO: 129 - protein, 15 aa, Homo sapiens
  IgA  CDR3 amino acids
CARAGRELLRALMTT

SEQ ID NO: 130 - protein, 15 aa, Homo sapiens
  IgA  CDR3 amino acids
CARAGAELLRALMTT

SEQ ID NO: 131 - protein, 18 aa, Homo sapiens
  IgA  CDR3 amino acids
CARAEDYYDTEGYFYLTP

SEQ ID NO: 132 - protein, 20 aa, Homo sapiens
  IgA  CDR3 amino acids
CAHRTNYSTNRYGAFTTLTS

SEQ ID NO: 133 - protein, 15 aa, Homo sapiens
  IgA  CDR3 amino acids
CVRHDGSFTKTGSTP

SEQ ID NO: 134 - protein, 15 aa, Homo sapiens
  IgA  CDR3 amino acids
CVRDPQETGATTLIT

SEQ ID NO: 135 - protein, 8 aa, Homo sapiens
  IgA  CDR3 amino acids
CVKIGAAH

SEQ ID NO: 136 - protein, 20 aa, Homo sapiens
  IgA  CDR3 amino acids
CATQCLGGAGLTTTTAPWTS

SEQ ID NO: 137 - protein, 15 aa, Homo sapiens
  IgA  CDR3 amino acids
CARRTYYSGSTNLTT

SEQ ID NO: 138 - protein, 14 aa, Homo sapiens
  IgA  CDR3 amino acids
CARRTTRETGSSIS

SEQ ID NO: 139 - protein, 25 aa, Homo sapiens
  IgA  CDR3 amino acids
CARLRCSNDNCAGHLYYYFSGLDIW

SEQ ID NO: 140 - protein, 13 aa, Homo sapiens
  IgA  CDR3 amino acids
CARASLPRGLLIS

SEQ ID NO: 141 - protein, 16 aa, Homo sapiens
  IgA  CDR3 amino acids
CAKGRGRRAAGKFLTT

SEQ ID NO: 142 - protein, 14 aa, Homo sapiens
  IgA  CDR3 amino acids
CVRQYGLGSGSLTP

SEQ ID NO: 143 - protein, 15 aa, Homo sapiens
  IgA  CDR3 amino acids
CVKIRNLIGFTGSTP

SEQ ID NO: 144 - protein, 16 aa, Homo sapiens
  IgA  CDR3 amino acids
CTRDGVRGDLNPTLNV

SEQ ID NO: 145 - protein, 16 aa, Homo sapiens
  IgA  CDR3 amino acids
CTKGGGRKTAGKFLTP

SEQ ID NO: 146 - protein, 12 aa, Homo sapiens
  IgA  CDR3 amino acids
CDKAKVTADLRT

SEQ ID NO: 147 - protein, 20 aa, Homo sapiens
  IgA  CDR3 amino acids
CATVPELPDISLPRLMALIS

SEQ ID NO: 148 - protein, 14 aa, Homo sapiens
  IgA  CDR3 amino acids
CATVFGRRYRLLTT

SEQ ID NO: 149 - protein, 15 aa, Homo sapiens
  IgA  CDR3 amino acids
CARYRAAYPRRAWTS

SEQ ID NO: 150 - protein, 20 aa, Homo sapiens
  IgA  CDR3 amino acids
CARTIGFEIAMTGGLGALTP

SEQ ID NO: 151 - protein, 10 aa, Homo sapiens
  IgA  CDR3 amino acids
CARTARTGDL

SEQ ID NO: 152 - protein, 18 aa, Homo sapiens
  IgA  CDR3 amino acids
CARRDPPVRASLSTTLTS

SEQ ID NO: 153 - protein, 22 aa, Homo sapiens
  IgA  CDR3 amino acids
CARIGHEFYSLTYSVNDVFDLW

SEQ ID NO: 154 - protein, 23 aa, Homo sapiens
  IgA  CDR3 amino acids
CARFQRYCRGGSCSATLDAFDKW

SEQ ID NO: 155 - protein, 20 aa, Homo sapiens
  IgA  CDR3 amino acids
CARDLGERRDGEPTNWFDAW

SEQ ID NO: 156 - protein, 13 aa, Homo sapiens
  IgA  CDR3 amino acids
CARDLAVWATLTT

SEQ ID NO: 157 - protein, 16 aa, Homo sapiens
  IgA  CDR3 amino acids
CAKGAGRRAAGKFLTT

SEQ ID NO: 158 - protein, 17 aa, Homo sapiens
  IgA  CDR3 amino acids
CAKDVEPTVTLYNHFDP

SEQ ID NO: 159 - protein, 11 aa, Homo sapiens
  IgA  CDR3 amino acids
CAKDFNWEGIT

SEQ ID NO: 160 - protein, 21 aa, Homo sapiens
  IgA  CDR3 amino acids
CAHRTNYSTNRYGGLYYFDFW

SEQ ID NO: 161 - protein, 13 aa, Homo sapiens
  IgA  CDR3 amino acids
CVRGVGTILWLTI

SEQ ID NO: 162 - protein, 20 aa, Homo sapiens
  IgA  CDR3 amino acids
CVRFIGAYSNNWYPGYFDYW

SEQ ID NO: 163 - protein, 13 aa, Homo sapiens
  IgA  CDR3 amino acids
CVRDAGPGGSLTS

SEQ ID NO: 164 - protein, 27 aa, Homo sapiens
  IgA  CDR3 amino acids
CTTGFSGSTACHWDHTACHWDDAFAMW

SEQ ID NO: 165 - protein, 15 aa, Homo sapiens
  IgA  CDR3 amino acids
CTHAVESLLGTTSTS

SEQ ID NO: 166 - protein, 18 aa, Homo sapiens
  IgA  CDR3 amino acids
CIHTGNDFGPGPTMVWTS

SEQ ID NO: 167 - protein, 16 aa, Homo sapiens
  IgA  CDR3 amino acids
CGVGRGDNDVDFKFKW

SEQ ID NO: 168 - protein, 10 aa, Homo sapiens
  IgA  CDR3 amino acids
CATRESPLTT

SEQ ID NO: 169 - protein, 15 aa, Homo sapiens
  IgA  CDR3 amino acids
CATAGIELWRAGSTP

SEQ ID NO: 170 - protein, 16 aa, Homo sapiens
  IgA  CDR3 amino acids
CASQSQNYYYYYMDVW

SEQ ID NO: 171 - protein, 16 aa, Homo sapiens
  IgA  CDR3 amino acids
CASKKEILWAGPNLTT

SEQ ID NO: 172 - protein, 17 aa, Homo sapiens
  IgA  CDR3 amino acids
CARYRIAMATSPYFDYW

SEQ ID NO: 173 - protein, 17 aa, Homo sapiens
  IgA  CDR3 amino acids
CARVRCGLVASEGVLIS

SEQ ID NO: 174 - protein, 22 aa, Homo sapiens
  IgA  CDR3 amino acids
CARTNFGSGGYILGDTTMVWTS

SEQ ID NO: 175 - protein, 13 aa, Homo sapiens
  IgA  CDR3 amino acids
CARSAGYLHRRTS

SEQ ID NO: 176 - protein, 16 aa, Homo sapiens
  IgA  CDR3 amino acids
CARRTYYSGSTNFDYW

SEQ ID NO: 177 - protein, 18 aa, Homo sapiens
  IgA  CDR3 amino acids
CARRDLPFGASLSTTLTS

SEQ ID NO: 178 - protein, 16 aa, Homo sapiens
  IgA  CDR3 amino acids
CARRAAPMTTGMFLIF

SEQ ID NO: 179 - protein, 14 aa, Homo sapiens
  IgA  CDR3 amino acids
CARPGFSYGPRLTP

SEQ ID NO: 180 - protein, 22 aa, Homo sapiens
  IgA  CDR3 amino acids
CARLRGGFPPVVKRVEVFLLTS

SEQ ID NO: 181 - protein, 16 aa, Homo sapiens
  IgA  CDR3 amino acids
CARKKIPTAGYSSLTT

SEQ ID NO: 182 - protein, 16 aa, Homo sapiens
  IgA  CDR3 amino acids
CARGSWMGRPFISLTT

SEQ ID NO: 183 - protein, 16 aa, Homo sapiens
  IgA  CDR3 amino acids
CARGRFARGGDDSLIS

SEQ ID NO: 184 - protein, 10 aa, Homo sapiens
  IgA  CDR3 amino acids
CARGLRWADN

SEQ ID NO: 185 - protein, 20 aa, Homo sapiens
  IgA  CDR3 amino acids
CARGGTSGLILDTTSTPWTS

SEQ ID NO: 186 - protein, 19 aa, Homo sapiens
  IgA  CDR3 amino acids
CAREMHIDSLTVGRAFDIW

SEQ ID NO: 187 - protein, 16 aa, Homo sapiens
  IgA  CDR3 amino acids
CARDVPDIYSSGATDC

SEQ ID NO: 188 - protein, 15 aa, Homo sapiens
  IgA  CDR3 amino acids
CARDPSYLPTPALKT

SEQ ID NO: 189 - protein, 17 aa, Homo sapiens
  IgA  CDR3 amino acids
CARDPNKFRPNHFVDYW

SEQ ID NO: 190 - protein, 15 aa, Homo sapiens
  IgA  CDR3 amino acids
CARDLGTTNYWLDTW

SEQ ID NO: 191 - protein, 13 aa, Homo sapiens
  IgA  CDR3 amino acids
CAKQRASGNSLTI

SEQ ID NO: 192 - protein, 17 aa, Homo sapiens
  IgA  CDR3 amino acids
CAKEPKIVGRRRTTLIT

SEQ ID NO: 193 - protein, 20 aa, Homo sapiens
  IgA  CDR3 amino acids
CAKDLGVCSEGAASSLVLIS

SEQ ID NO: 194 - protein, 13 aa, Homo sapiens
  IgA  CDR3 amino acids
CAKAPGDLCRSTP

SEQ ID NO: 195 - protein, 24 aa, Homo sapiens
  IgA  CDR3 amino acids
CAHSAPYYDICLVTAHEVGRILTT

SEQ ID NO: 196 - protein, 13 aa, Homo sapiens
  IgA  CDR3 amino acids
CAGLIGRFIPLTT

SEQ ID NO: 197 - protein, 19 aa, Homo sapiens
  IgA  CDR3 amino acids
CAGIRGSNIYYHYYYMDVW

SEQ ID NO: 198 - protein, 13 aa, Homo sapiens
  IgA  CDR3 amino acids
CADLPGIIGGEIT

SEQ ID NO: 199 - protein, 26 aa, Homo sapiens
  IGHD3-22  CDR3 amino acids
CARHDTPRVYYDSSGYYYGVDYFDYW

SEQ ID NO: 200 - protein, 26 aa, Homo sapiens
  IGHD3-22  CDR3 amino acids
CASMDTKNYYDSSGSQPRRSYYFDYW

SEQ ID NO: 201 - protein, 20 aa, Homo sapiens
  IGHD3-22  CDR3 amino acids
CAQYYYDSSGYYYYYGMDVW

SEQ ID NO: 202 - protein, 18 aa, Homo sapiens
  IGHD3-22  CDR3 amino acids
CARISYYYDSSGYYYRDW

SEQ ID NO: 203 - protein, 18 aa, Homo sapiens
  IGHD3-22  CDR3 amino acids
CARVRGITMIVVVTTLTT

SEQ ID NO: 204 - protein, 25 aa, Homo sapiens
  IGHD3-22  CDR3 amino acids
CASMDTKNYYDSSGSQPGGRTTLTT

SEQ ID NO: 205 - protein, 25 aa, Homo sapiens
  IGHD3-22  CDR3 amino acids
CASMDTKITMIVVVPNPGGRTTLTT

SEQ ID NO: 206 - protein, 12 aa, Homo sapiens
  IGHD3-22  CDR3 amino acids
CARYNYTIVVGP

SEQ ID NO: 207 - protein, 17 aa, Homo sapiens
  IGHD3-22  CDR3 amino acids
CARISYYYDSSGYYTVT

SEQ ID NO: 208 - protein, 19 aa, Homo sapiens
  IGHD3-22  CDR3 amino acids
CARIRYYYDSSGYYYFDYW

SEQ ID NO: 209 - protein, 18 aa, Homo sapiens
  IGHD3-22  CDR3 amino acids
CARHVRDGMIVVAEIDYW

SEQ ID NO: 210 - protein, 17 aa, Homo sapiens
  IGHD3-22  CDR3 amino acids
CARVAVRSYYPFGMDVW

SEQ ID NO: 211 - protein, 15 aa, Homo sapiens
  IGHD3-22  CDR3 amino acids
CARLPLDSSGYYLTT

SEQ ID NO: 212 - protein, 16 aa, Homo sapiens
  IGHD3-22  CDR3 amino acids
CARLPLDSSGYYFDYW

SEQ ID NO: 213 - protein, 26 aa, Homo sapiens
  IGHD3-22  CDR3 amino acids
CASMDTKNYYDSSGSQPRRSHYFDYW

SEQ ID NO: 214 - protein, 17 aa, Homo sapiens
  IGHD3-22  CDR3 amino acids
CARYRITMIVVVITTVT

SEQ ID NO: 215 - protein, 13 aa, Homo sapiens
  IGHD3-22  CDR3 amino acids
CARYNYYDSSGSW

SEQ ID NO: 216 - protein, 19 aa, Homo sapiens
  IGHD3-22  CDR3 amino acids
CARVRGYYDSMSMSALLMS

SEQ ID NO: 217 - protein, 19 aa, Homo sapiens
  IGHD3-22  CDR3 amino acids
CARVRGTMIVVSMSALLMS

SEQ ID NO: 218 - protein, 19 aa, Homo sapiens
  IGHD3-22  CDR3 amino acids
CARVRGNYYDSSGYYFDYW

SEQ ID NO: 219 - protein, 16 aa, Homo sapiens
  IGHD3-22  CDR3 amino acids
CARSGRVGARPKLYYW

SEQ ID NO: 220 - protein, 17 aa, Homo sapiens
  IGHD3-22  CDR3 amino acids
CARISYYYDVVVITTVT

SEQ ID NO: 221 - protein, 17 aa, Homo sapiens
  IGHD3-22  CDR3 amino acids
CARHVRDGMIVVAEMTT

SEQ ID NO: 222 - protein, 26 aa, Homo sapiens
  IGHD3-22  CDR3 amino acids
CARHDTPRAYYDSSGYYYGVDYFDYW

SEQ ID NO: 223 - protein, 21 aa, Homo sapiens
  IGHD3-22  CDR3 amino acids
CAREFFGTRTMIVVVTYFDYW

SEQ ID NO: 224 - protein, 19 aa, Homo sapiens
  IGHD3-22  CDR3 amino acids
CAQYYYDSMVITTTTVWTS

SEQ ID NO: 225 - protein, 18 aa, Homo sapiens
  IGHD3-10  CDR3 amino acids
CARGVRGVIINTFTTLTT

SEQ ID NO: 226 - protein, 14 aa, Homo sapiens
  IGHD3-10  CDR3 amino acids
CTWFGEATTTVWTS

SEQ ID NO: 227 - protein, 18 aa, Homo sapiens
  IGHD3-10  CDR3 amino acids
CARGGSGVIINTFTTLTT

SEQ ID NO: 228 - protein, 19 aa, Homo sapiens
  IGHD3-10  CDR3 amino acids
CARCAGGSGSYYYYYMEVW

SEQ ID NO: 229 - protein, 17 aa, Homo sapiens
  IGHD3-10  CDR3 amino acids
CVKAGFGELLIGGDRTT

SEQ ID NO: 230 - protein, 19 aa, Homo sapiens
  IGHD3-10  CDR3 amino acids
CARGGSGSYYKHVYYFDYW

SEQ ID NO: 231 - protein, 18 aa, Homo sapiens
  IGHD3-10  CDR3 amino acids
CARCAGGSGVTTTTTWRS

SEQ ID NO: 232 - protein, 15 aa, Homo sapiens
  IGHD3-10  CDR3 amino acids
CTWFGGGYYYGMDVW

SEQ ID NO: 233 - protein, 14 aa, Homo sapiens
  IGHD3-10  CDR3 amino acids
CTWFGGATTTVWTS

SEQ ID NO: 234 - protein, 16 aa, Homo sapiens
  IGHD3-10  CDR3 amino acids
CARLDGSGRRGTALTT

SEQ ID NO: 235 - protein, 16 aa, Homo sapiens
  IGHD3-10  CDR3 amino acids
CARLDVRGGRGTALTT

SEQ ID NO: 236 - protein, 18 aa, Homo sapiens
  IGHD3-10  CDR3 amino acids
CARGGSGVIINTFTTLTM

SEQ ID NO: 237 - protein, 18 aa, Homo sapiens
  IGHD3-10  CDR3 amino acids
CARCAGVRGVTTTTTWRS

SEQ ID NO: 238 - protein, 19 aa, Homo sapiens
  IGHD3-16  CDR3 amino acids
CARRVMITFGELSSTTLTT

SEQ ID NO: 239 - protein, 19 aa, Homo sapiens
  IGHD3-16  CDR3 amino acids
CARRVMITFGGVIVTTLTM

SEQ ID NO: 240 - protein, 20 aa, Homo sapiens
  IGHD3-16  CDR3 amino acids
CARRVMITFGGVIVDYFDYW

SEQ ID NO: 241 - protein, 19 aa, Homo sapiens
  IGHD3-16  CDR3 amino acids
CARRVMITFGGVIVDTLTT

SEQ ID NO: 242 - protein, 14 aa, Homo sapiens
  IGHD3-16  CDR3 amino acids
CANPTSFRQCSMTT

SEQ ID NO: 243 - protein, 19 aa, Homo sapiens
  IGHD3-16  CDR3 amino acids
CARRVMITLGELSSTTLTT

SEQ ID NO: 244 - protein, 19 aa, Homo sapiens
  IGHD3-16  CDR3 amino acids
CARRAMITFGELSSTTLTT

SEQ ID NO: 245 - protein, 15 aa, Homo sapiens
  IGHD6-19  CDR3 amino acids
CARHGIAVAYYFDYW

SEQ ID NO: 246 - protein, 20 aa, Homo sapiens
  IGHD6-19  CDR3 amino acids
CARVSSGWSGGNPAPATLTT

SEQ ID NO: 247 - protein, 15 aa, Homo sapiens
  IGHD6-19  CDR3 amino acids
CARHVGSGWVYFDYW

SEQ ID NO: 248 - protein, 16 aa, Homo sapiens
  IGHD6-19  CDR3 amino acids
CARRDDSSGWYGHDYW

SEQ ID NO: 249 - protein, 15 aa, Homo sapiens
  IGHD6-19  CDR3 amino acids
CARGYSSGFGDALIP

SEQ ID NO: 250 - protein, 20 aa, Homo sapiens
  IGHD6-19  CDR3 amino acids
CARVSSGWSGVTPAPATLTT

SEQ ID NO: 251 - protein, 15 aa, Homo sapiens
  IGHD6-19  CDR3 amino acids
CARRDDSMAGTAMTT

SEQ ID NO: 252 - protein, 16 aa, Homo sapiens
  IGHD6-19  CDR3 amino acids
CARGYSSGFGDAFDTW

SEQ ID NO: 253 - protein, 20 aa, Homo sapiens
  IGHD6-19  CDR3 amino acids
CARGIRYSSGWYGSNWFDPW

SEQ ID NO: 254 - protein, 15 aa, Homo sapiens
  IGHD6-19  CDR3 amino acids
CARRDDSSGWYGHDY

SEQ ID NO: 255 - protein, 15 aa, Homo sapiens
  IGHD6-19  CDR3 amino acids
CARRDDSSAGTAMTT

SEQ ID NO: 256 - protein, 14 aa, Homo sapiens
  IGHD6-19  CDR3 amino acids
CARHGIAWPTTLTT

SEQ ID NO: 257 - protein, 14 aa, Homo sapiens
  IGHD6-19  CDR3 amino acids
CARHVGSGWVTLTT

SEQ ID NO: 258 - protein, 14 aa, Homo sapiens
  IGHD6-19  CDR3 amino acids
CARHGIAVAYYLTT

SEQ ID NO: 259 - protein, 20 aa, Homo sapiens
  IGHD5-5  CDR3 amino acids
CARAGGYSYGYLLPLMLLIS

SEQ ID NO: 260 - protein, 20 aa, Homo sapiens
  IGHD5-5  CDR3 amino acids
CARRKRELLWVTTTTTTWTS

SEQ ID NO: 261 - protein, 12 aa, Homo sapiens
  IGHD5-5  CDR3 amino acids
CARQKSATVWTS

SEQ ID NO: 262 - protein, 22 aa, Homo sapiens
  IGHD5-5  CDR3 amino acids
CARVNLEQLWYRRGTTTTVWTS

SEQ ID NO: 263 - protein, 22 aa, Homo sapiens
  IGHD5-5  CDR3 amino acids
CARVNLEQLCTGRGTTTTVWTS

SEQ ID NO: 264 - protein, 20 aa, Homo sapiens
  IGHD5-5  CDR3 amino acids
CARFYNRRMLSTAMVDIDYW

SEQ ID NO: 265 - protein, 23 aa, Homo sapiens
  IGHD5-5  CDR3 amino acids
CARVNLEQLWYRTGYYYYGMDVW

SEQ ID NO: 266 - protein, 16 aa, Homo sapiens
  IGHD5-5  CDR3 amino acids
CARLFNYAREYGMDVW

SEQ ID NO: 267 - protein, 22 aa, Homo sapiens
  IGHD5-5  CDR3 amino acids
CARVNLEQLWYRTGSTTTVWTS

SEQ ID NO: 268 - protein, 10 aa, Homo sapiens
  IGHD5-5  CDR3 amino acids
CARVAPRLTT

SEQ ID NO: 269 - protein, 16 aa, Homo sapiens
  IGHD5-5  CDR3 amino acids
CARLFNYARGVRVWTS

SEQ ID NO: 270 - protein, 15 aa, Homo sapiens
  IGHD1-26  CDR3 amino acids
CARHVGSGWVYFDYW

SEQ ID NO: 271 - protein, 18 aa, Homo sapiens
  IGHD1-26  CDR3 amino acids
CARAQYSGATECKGTLTT

SEQ ID NO: 272 - protein, 18 aa, Homo sapiens
  IGHD1-26  CDR3 amino acids
CARHSLTPGFLLNYFDYW

SEQ ID NO: 273 - protein, 19 aa, Homo sapiens
  IGHD1-26  CDR3 amino acids
CTRSRGLSGTYYNPDNDYW

SEQ ID NO: 274 - protein, 19 aa, Homo sapiens
  IGHD1-26  CDR3 amino acids
CARAQYSGSYRMQRYFDYW

SEQ ID NO: 275 - protein, 17 aa, Homo sapiens
  IGHD1-26  CDR3 amino acids
CARHVKVLGATVGFDYW

SEQ ID NO: 276 - protein, 18 aa, Homo sapiens
  IGHD1-26  CDR3 amino acids
CARAQYSGSYRCKGTLTT

SEQ ID NO: 277 - protein, 18 aa, Homo sapiens
  IGHD1-26  CDR3 amino acids
CTRSRGLSGTTTIQIMTT

SEQ ID NO: 278 - protein, 18 aa, Homo sapiens
  IGHD1-26  CDR3 amino acids
CARPSIVGATECKGTLTT

SEQ ID NO: 279 - protein, 14 aa, Homo sapiens
  IGHD1-26  CDR3 amino acids
CARHVAVAGSTLTT

SEQ ID NO: 280 - protein, 18 aa, Homo sapiens
  IGHD1-26  CDR3 amino acids
CARAQYSGSYRMQRYLTT

SEQ ID NO: 281 - protein, 18 aa, Homo sapiens
  IGHD1-26  CDR3 amino acids
CARAQYSGSYRMQGTLTT

SEQ ID NO: 282 - protein, 12 aa, Homo sapiens
  IGHD1-26  CDR3 amino acids
CAHTHRSVGATA

SEQ ID NO: 283 - protein, 25 aa, Homo sapiens
  IGHD6-13  CDR3 amino acids
CAKVTHAYSSTWYHGDYYYYGMDVW

SEQ ID NO: 284 - protein, 20 aa, Homo sapiens
  IGHD6-13  CDR3 amino acids
CARGHLPYSSTDKGHWFDPW

SEQ ID NO: 285 - protein, 17 aa, Homo sapiens
  IGHD6-13  CDR3 amino acids
CARDSSHGYSSSWPDYW

SEQ ID NO: 286 - protein, 24 aa, Homo sapiens
  IGHD6-13  CDR3 amino acids
CAKLPMRIAAPGTMGTTTTTVWTS

SEQ ID NO: 287 - protein, 16 aa, Homo sapiens
  IGHD6-13  CDR3 amino acids
CARDSSTGIAAAGPTT

SEQ ID NO: 288 - protein, 17 aa, Homo sapiens
  IGHD2-15  CDR3 amino acids
CLASRPLWFGDPNGSTP

SEQ ID NO: 289 - protein, 20 aa, Homo sapiens
  IGHD2-15  CDR3 amino acids
CAKDSSRYCSGGSCKYFDYW

SEQ ID NO: 290 - protein, 16 aa, Homo sapiens
  IGHD2-15  CDR3 amino acids
CAKNPASTGYGSFDYW

SEQ ID NO: 291 - protein, 15 aa, Homo sapiens
  IGHD2-15  CDR3 amino acids
CAKIRPVLVTEALTI

SEQ ID NO: 292 - protein, 19 aa, Homo sapiens
  IGHD2-15  CDR3 amino acids
CAKDSSRYCMVVAANTLTT

SEQ ID NO: 293 - protein, 17 aa, Homo sapiens
  IGHD2-15  CDR3 amino acids
CARLILGYCSGVGCTPT

SEQ ID NO: 294 - protein, 16 aa, Homo sapiens
  IGHD2-15  CDR3 amino acids
CARDRGSGGSCYVLTT

SEQ ID NO: 295 - protein, 15 aa, Homo sapiens
  IGHD2-15  CDR3 amino acids
CARDGVVVVLLLLTT

SEQ ID NO: 296 - protein, 19 aa, Homo sapiens
  IGHD2-15  CDR3 amino acids
CANWARVVVASGTTTTWTS

SEQ ID NO: 297 - protein, 15 aa, Homo sapiens
  IGHD2-15  CDR3 amino acids
CAKNPPVLVTEALTI

SEQ ID NO: 298 - protein, 15 aa, Homo sapiens
  IGHD2-15  CDR3 amino acids
CAKNPAVLVTEALTI

SEQ ID NO: 299 - protein, 21 aa, Homo sapiens
  IGHD3-3  CDR3 amino acids
CASKKKFLEWPETTTTTVWTS

SEQ ID NO: 300 - protein, 20 aa, Homo sapiens
  IGHD3-3  CDR3 amino acids
CARKEFLEWPETTTTTVWTS

SEQ ID NO: 301 - protein, 25 aa, Homo sapiens
  IGHD3-3  CDR3 amino acids
CAKDINPDYDFWSGSHLPYDAFDIW

SEQ ID NO: 302 - protein, 21 aa, Homo sapiens
  IGHD3-3  CDR3 amino acids
CARKKNFLEWPETTTTTVWTS

SEQ ID NO: 303 - protein, 24 aa, Homo sapiens
  IGHD3-3  CDR3 amino acids
CAKDINPDYDFWSGSHLPYDALIS

SEQ ID NO: 304 - protein, 24 aa, Homo sapiens
  IGHD2-2  CDR3 amino acids
CARDARYCSSTSCYSFPYWYFDLW

SEQ ID NO: 305 - protein, 23 aa, Homo sapiens
  IGHD2-2  CDR3 amino acids
CARDARYCSSTSCYSFPTGTSIS

SEQ ID NO: 306 - protein, 24 aa, Homo sapiens
  IGHD2-2  CDR3 amino acids
CARDARYCSSTSCYRFPYWYFDLW

SEQ ID NO: 307 - protein, 17 aa, Homo sapiens
  IGHD5-12  CDR3 amino acids
CARRLGRVATTYYMDVW

SEQ ID NO: 308 - protein, 16 aa, Homo sapiens
  IGHD5-12  CDR3 amino acids
CARRLVEWLRPTTWTS

SEQ ID NO: 309 - protein, 17 aa, Homo sapiens
  IGHD5-12  CDR3 amino acids
CARRVGVEWLRPTTWTS

SEQ ID NO: 310 - protein, 18 aa, Homo sapiens
  IGHD2-8  CDR3 amino acids
CTRDIVLTTPREWYFDLW

SEQ ID NO: 311 - protein, 17 aa, Homo sapiens
  IGHD2-8  CDR3 amino acids
CTRDIVLTTPGSGTSIS

SEQ ID NO: 312 - protein, 17 aa, Homo sapiens
  IGHD4-17  CDR3 amino acids
CARDLIYGDYPTTTWTS

SEQ ID NO: 313 - protein, 15 aa, Homo sapiens
  IgD  CDR3 amino acids
CARGAAPGVETGSTP

SEQ ID NO: 314 - protein, 26 aa, Homo sapiens
  IgD  CDR3 amino acids
CARHTLFSDSSAPPRGVYYYYYMDVW

SEQ ID NO: 315 - protein, 15 aa, Homo sapiens
  IgD  CDR3 amino acids
CARGATVGVETGSTP

SEQ ID NO: 316 - protein, 15 aa, Homo sapiens
  IgD  CDR3 amino acids
CANWAGVTGTVPLTT

SEQ ID NO: 317 - protein, 12 aa, Homo sapiens
  IgD  CDR3 amino acids
CARQKSATVWTS

SEQ ID NO: 318 - protein, 15 aa, Homo sapiens
  IgD  CDR3 amino acids
CARAGIQLEVFTLTT

SEQ ID NO: 319 - protein, 16 aa, Homo sapiens
  IgD  CDR3 amino acids
CARLDGSGGRGTALTT

SEQ ID NO: 320 - protein, 20 aa, Homo sapiens
  IgD  CDR3 amino acids
CARRKRELLWVTTTTTTWTS

SEQ ID NO: 321 - protein, 15 aa, Homo sapiens
  IgD  CDR3 amino acids
CANPDLISAMFDDYW

SEQ ID NO: 322 - protein, 20 aa, Homo sapiens
  IgD  CDR3 amino acids
CARHQCSGEACFYYYGMDVW

SEQ ID NO: 323 - protein, 14 aa, Homo sapiens
  IgD  CDR3 amino acids
CANPTSFRQCSMTT

SEQ ID NO: 324 - protein, 13 aa, Homo sapiens
  IgD  CDR3 amino acids
CARGGTIPFPWTS

SEQ ID NO: 325 - protein, 14 aa, Homo sapiens
  IgD  CDR3 amino acids
CARAQGGAHTTLTT

SEQ ID NO: 326 - protein, 15 aa, Homo sapiens
  IgD  CDR3 amino acids
CTRDTGSSAGATDLW

SEQ ID NO: 327 - protein, 15 aa, Homo sapiens
  IgD  CDR3 amino acids
CAKAVAVTGSHFDYW

SEQ ID NO: 328 - protein, 15 aa, Homo sapiens
  IgD  CDR3 amino acids
CARGAAPGVETGSTL

SEQ ID NO: 329 - protein, 15 aa, Homo sapiens
  IgD  CDR3 amino acids
CARAQGRGTYYFDYW

SEQ ID NO: 330 - protein, 11 aa, Homo sapiens
  IgD  CDR3 amino acids
CARAIIRYFND

SEQ ID NO: 331 - protein, 15 aa, Homo sapiens
  IgD  CDR3 amino acids
CAIPPDGSRRSPLTT

SEQ ID NO: 332 - protein, 18 aa, Homo sapiens
  IgD  CDR3 amino acids
CVREGFCGAHGCYSLTYW

SEQ ID NO: 333 - protein, 25 aa, Homo sapiens
  IgD  CDR3 amino acids
CARHTLFSDSSAPPRGSTTTTTWTS

SEQ ID NO: 334 - protein, 15 aa, Homo sapiens
  IgD  CDR3 amino acids
CARGYSSASVMLLIP

SEQ ID NO: 335 - protein, 17 aa, Homo sapiens
  IgD  CDR3 amino acids
CVREGFVVLMAVILLPT

SEQ ID NO: 336 - protein, 11 aa, Homo sapiens
  IgD  CDR3 amino acids
CARSGPRGLTT

SEQ ID NO: 337 - protein, 18 aa, Homo sapiens
  IgD  CDR3 amino acids
CARHSLTPGFLLNYFDYW

SEQ ID NO: 338 - protein, 10 aa, Homo sapiens
  IgD  CDR3 amino acids
CARGWELDRW

SEQ ID NO: 339 - protein, 18 aa, Homo sapiens
  IgD  CDR3 amino acids
CARDPSSLYYYYYGMDVW

SEQ ID NO: 340 - protein, 11 aa, Homo sapiens
  IgD  CDR3 amino acids
CARAIIHISMT

SEQ ID NO: 341 - protein, 14 aa, Homo sapiens
  IgD  CDR3 amino acids
CANPDSFRQCSMTT

SEQ ID NO: 342 - protein, 15 aa, Homo sapiens
  IgD  CDR3 amino acids
CAIPRTEGRRSPLTT

SEQ ID NO: 343 - protein, 13 aa, Homo sapiens
  IgD  CDR3 amino acids
CARTFGDSAALIS

SEQ ID NO: 344 - protein, 16 aa, Homo sapiens
  IgD  CDR3 amino acids
CARLFNYAREYGMDVW

SEQ ID NO: 345 - protein, 26 aa, Homo sapiens
  IgD  CDR3 amino acids
CARHTLFSDSSAPPTGGLLLLLHGRL

SEQ ID NO: 346 - protein, 25 aa, Homo sapiens
  IgD  CDR3 amino acids
CARHTLFRIVVPLPGGSTTTTTWTS

SEQ ID NO: 347 - protein, 15 aa, Homo sapiens
  IgD  CDR3 amino acids
CARDLGESSSTTLTT

SEQ ID NO: 348 - protein, 12 aa, Homo sapiens
  IgD  CDR3 amino acids
CARAIIRYFNDW

SEQ ID NO: 349 - protein, 16 aa, Homo sapiens
  IgD  CDR3 amino acids
CAPGGLRLGVETGSTP

SEQ ID NO: 350 - protein, 20 aa, Homo sapiens
  IgD  CDR3 amino acids
CARTLDYGIATGSIIMVWTS

SEQ ID NO: 351 - protein, 16 aa, Homo sapiens
  IgD  CDR3 amino acids
CARRLGRVARPTTWTS

SEQ ID NO: 352 - protein, 15 aa, Homo sapiens
  IgD  CDR3 amino acids
CARLFNTPGSTVWTS

SEQ ID NO: 353 - protein, 15 aa, Homo sapiens
  IgD  CDR3 amino acids
CAIPPTEGRRSPLTT

SEQ ID NO: 354 - protein, 16 aa, Homo sapiens
  IgD  CDR3 amino acids
CAIPPDGRQTVPFDYW

SEQ ID NO: 355 - protein, 14 aa, Homo sapiens
  IgD  CDR3 amino acids
CTRDTGSPPEPLTS

SEQ ID NO: 356 - protein, 11 aa, Homo sapiens
  IgD  CDR3 amino acids
CATSRGGRGTT

SEQ ID NO: 357 - protein, 10 aa, Homo sapiens
  IgD  CDR3 amino acids
CATSGGVGDY

SEQ ID NO: 358 - protein, 14 aa, Homo sapiens
  IgD  CDR3 amino acids
CATPTSFRQCSMTT

SEQ ID NO: 359 - protein, 16 aa, Homo sapiens
  IgD  CDR3 amino acids
CATAAGLWSSSTTWTS

SEQ ID NO: 360 - protein, 17 aa, Homo sapiens
  IgD  CDR3 amino acids
CATAAGLWSSKYYMDVW

SEQ ID NO: 361 - protein, 12 aa, Homo sapiens
  IgD  CDR3 amino acids
CASKKSATVWTS

SEQ ID NO: 362 - protein, 13 aa, Homo sapiens
  IgD  CDR3 amino acids
CARVGSSTMLLIS

SEQ ID NO: 363 - protein, 13 aa, Homo sapiens
  IgD  CDR3 amino acids
CARVGSSPMLLIS

SEQ ID NO: 364 - protein, 13 aa, Homo sapiens
  IgD  CDR3 amino acids
CARVAARPMLLIS

SEQ ID NO: 365 - protein, 13 aa, Homo sapiens
  IgD  CDR3 amino acids
CARTFVIRLLLIS

SEQ ID NO: 366 - protein, 16 aa, Homo sapiens
  IgD  CDR3 amino acids
CARRLGRVLRPTTWTS

SEQ ID NO: 367 - protein, 21 aa, Homo sapiens
  IgD  CDR3 amino acids
CARRKKGSCYRVTTTTTTWTS

SEQ ID NO: 368 - protein, 15 aa, Homo sapiens
  IgD  CDR3 amino acids
CARLFNYARSTVWTS

SEQ ID NO: 369 - protein, 14 aa, Homo sapiens
  IgD  CDR3 amino acids
CARHVGMAGSTLTT

SEQ ID NO: 370 - protein, 26 aa, Homo sapiens
  IgD  CDR3 amino acids
CARHTLFSDSSAPPRGGLLLLLHGRL

SEQ ID NO: 371 - protein, 26 aa, Homo sapiens
  IgD  CDR3 amino acids
CARHTLFSDSSALPRGVYYYYYMDVW

SEQ ID NO: 372 - protein, 25 aa, Homo sapiens
  IgD  CDR3 amino acids
CARHTLFSDSSALPGGSTTTTTWTS

SEQ ID NO: 373 - protein, 19 aa, Homo sapiens
  IgD  CDR3 amino acids
CARHQCSGEACFYYTAWTS

SEQ ID NO: 374 - protein, 15 aa, Homo sapiens
  IgD  CDR3 amino acids
CARGYSMASVMLLIP

SEQ ID NO: 375 - protein, 9 aa, Homo sapiens
  IgD  CDR3 amino acids
CARGWELDR

SEQ ID NO: 376 - protein, 15 aa, Homo sapiens
  IgD  CDR3 amino acids
CARGQMGATTLIDYW

SEQ ID NO: 377 - protein, 13 aa, Homo sapiens
  IgD  CDR3 amino acids
CAREWPTGTRGMW

SEQ ID NO: 378 - protein, 13 aa, Homo sapiens
  IgD  CDR3 amino acids
CAREWPTGTRGMC

SEQ ID NO: 379 - protein, 14 aa, Homo sapiens
  IgD  CDR3 amino acids
CAREWPTGNQRGCG

SEQ ID NO: 380 - protein, 9 aa, Homo sapiens
  IgD  CDR3 amino acids
CARDSTQTT

SEQ ID NO: 381 - protein, 18 aa, Homo sapiens
  IgD  CDR3 amino acids
CARAQYGGATECKGTLTT

SEQ ID NO: 382 - protein, 15 aa, Homo sapiens
  IgD  CDR3 amino acids
CARAQGAGAHTTLTT

SEQ ID NO: 383 - protein, 11 aa, Homo sapiens
  IgD  CDR3 amino acids
CARAKYDISMT

SEQ ID NO: 384 - protein, 11 aa, Homo sapiens
  IgD  CDR3 amino acids
CARAIYDISMT

SEQ ID NO: 385 - protein, 11 aa, Homo sapiens
  IgD  CDR3 amino acids
CARAIIRYSMT

SEQ ID NO: 386 - protein, 15 aa, Homo sapiens
  IgD  CDR3 amino acids
CARAHGAGAHTTLTT

SEQ ID NO: 387 - protein, 15 aa, Homo sapiens
  IgD  CDR3 amino acids
CANWPGVTGTVPLTT

SEQ ID NO: 388 - protein, 12 aa, Homo sapiens
  IgD  CDR3 amino acids
CAKRWGSSSWTT

SEQ ID NO: 389 - protein, 15 aa, Homo sapiens
  IgD  CDR3 amino acids
CAKIRPVLVTEALTI

SEQ ID NO: 390 - protein, 17 aa, Homo sapiens
  IgD  CDR3 amino acids
CAKDLHSYGYLGAFDIW

SEQ ID NO: 391 - protein, 15 aa, Homo sapiens
  IgD  CDR3 amino acids
CAIPPDGRQTSPLTT

SEQ ID NO: 392 - protein, 15 aa, Homo sapiens
  IgD  CDR3 amino acids
CAIPPDGRQTAPLTT

SEQ ID NO: 393 - protein, 12 aa, Homo sapiens
  IgD  CDR3 amino acids
CAHTHRSVGALP

SEQ ID NO: 394 - protein, 10 aa, Homo sapiens
  IgD  CDR3 amino acids
CAGVAPRLTT

SEQ ID NO: 395 - protein, 12 aa, Homo sapiens
  IGHD4-17  CDR3 amino acids
CARGFDGGWEHW

SEQ ID NO: 396 - protein, 13 aa, Homo sapiens
  IGHD4-17  CDR3 amino acids
CARGFLMVAGEHW

SEQ ID NO: 397 - protein, 12 aa, Homo sapiens
  IGHD4-17  CDR3 amino acids
CARGFLMVAGST

SEQ ID NO: 398 - protein, 12 aa, Homo sapiens
  IGHD4-17  CDR3 amino acids
CARGFDGGWGAL

SEQ ID NO: 399 - protein, 11 aa, Homo sapiens
  IGHD4-17  CDR3 amino acids
CARGFDGGWEH

SEQ ID NO: 400 - protein, 11 aa, Homo sapiens
  IGHD4-17  CDR3 amino acids
CARGFDGAGST

SEQ ID NO: 401 - protein, 12 aa, Homo sapiens
  IGHD4-17  CDR3 amino acids
CARGFDGGWEYW

SEQ ID NO: 402 - protein, 12 aa, Homo sapiens
  IGHD4-17  CDR3 amino acids
CARGFDGGWEHR

SEQ ID NO: 403 - protein, 12 aa, Homo sapiens
  IGHD4-17  CDR3 amino acids
CAGGFDGGWEHW

SEQ ID NO: 404 - protein, 11 aa, Homo sapiens
  IGHD4-17  CDR3 amino acids
CARGLMVAGST

SEQ ID NO: 405 - protein, 11 aa, Homo sapiens
  IGHD4-17  CDR3 amino acids
CARGFDGGWST

SEQ ID NO: 406 - protein, 12 aa, Homo sapiens
  IGHD4-17  CDR3 amino acids
CARGFDGGREHW

SEQ ID NO: 407 - protein, 12 aa, Homo sapiens
  IGHD4-17  CDR3 amino acids
CVRGFDGGWEHW

SEQ ID NO: 408 - protein, 12 aa, Homo sapiens
  IGHD4-17  CDR3 amino acids
CARGLDGGWEHW

SEQ ID NO: 409 - protein, 12 aa, Homo sapiens
  IGHD4-17  CDR3 amino acids
CARGFDGGWGHW

SEQ ID NO: 410 - protein, 13 aa, Homo sapiens
  IGHD4-17  CDR3 amino acids
CARGFDGGWGALG

SEQ ID NO: 411 - protein, 12 aa, Homo sapiens
  IGHD4-17  CDR3 amino acids
CARGFDGAGEHW

SEQ ID NO: 412 - protein, 12 aa, Homo sapiens
  IGHD4-17  CDR3 amino acids
CARGSDGGWEHW

SEQ ID NO: 413 - protein, 12 aa, Homo sapiens
  IGHD4-17  CDR3 amino acids
CARGFGGGWEHW

SEQ ID NO: 414 - protein, 12 aa, Homo sapiens
  IGHD4-17  CDR3 amino acids
CARGFDGSWEHW

SEQ ID NO: 415 - protein, 12 aa, Homo sapiens
  IGHD4-17  CDR3 amino acids
CARGFDGGWERW

SEQ ID NO: 416 - protein, 12 aa, Homo sapiens
  IGHD4-17  CDR3 amino acids
CARGFDDGWEHW

SEQ ID NO: 417 - protein, 12 aa, Homo sapiens
  IGHD4-17  CDR3 amino acids
YARGFDGGWEHW

SEQ ID NO: 418 - protein, 12 aa, Homo sapiens
  IGHD4-17  CDR3 amino acids
CARGFDGGWKHW

SEQ ID NO: 419 - protein, 12 aa, Homo sapiens
  IGHD4-17  CDR3 amino acids
CARGFDGGSGAL

SEQ ID NO: 420 - protein, 12 aa, Homo sapiens
  IGHD4-17  CDR3 amino acids
CARGFVWWLGGT

SEQ ID NO: 421 - protein, 12 aa, Homo sapiens
  IGHD4-17  CDR3 amino acids
CARGFDSGWEHW

SEQ ID NO: 422 - protein, 12 aa, Homo sapiens
  IGHD4-17  CDR3 amino acids
CARGFDRWLGAL

SEQ ID NO: 423 - protein, 12 aa, Homo sapiens
  IGHD4-17  CDR3 amino acids
CARGFDGGWVHW

SEQ ID NO: 424 - protein, 12 aa, Homo sapiens
  IGHD4-17  CDR3 amino acids
CARGFDGGWEAL

SEQ ID NO: 425 - protein, 12 aa, Homo sapiens
  IGHD4-17  CDR3 amino acids
CARGFDGDWEHW

SEQ ID NO: 426 - protein, 11 aa, Homo sapiens
  IGHD4-17  CDR3 amino acids
CARGFDGAGSM

SEQ ID NO: 427 - protein, 12 aa, Homo sapiens
  IGHD4-17  CDR3 amino acids
CARSFDGGWEHW

SEQ ID NO: 428 - protein, 13 aa, Homo sapiens
  IGHD4-17  CDR3 amino acids
CARGFLMVAGEHG

SEQ ID NO: 429 - protein, 12 aa, Homo sapiens
  IGHD4-17  CDR3 amino acids
CARGFLMVAGEH

SEQ ID NO: 430 - protein, 11 aa, Homo sapiens
  IGHD4-17  CDR3 amino acids
CARGFDVAGST

SEQ ID NO: 431 - protein, 12 aa, Homo sapiens
  IGHD4-17  CDR3 amino acids
CARGFDGGWEHS

SEQ ID NO: 432 - protein, 12 aa, Homo sapiens
  IGHD4-17  CDR3 amino acids
CARGFDGGWEHG

SEQ ID NO: 433 - protein, 12 aa, Homo sapiens
  IGHD4-17  CDR3 amino acids
CARGFDGGCEHW

SEQ ID NO: 434 - protein, 11 aa, Homo sapiens
  IGHD4-17  CDR3 amino acids
CARGFDGAGEH

SEQ ID NO: 435 - protein, 12 aa, Homo sapiens
  IGHD1-7  CDR3 amino acids
CARGFDGGWEHW

SEQ ID NO: 436 - protein, 12 aa, Homo sapiens
  IgE  CDR3 amino acids
CARGFDGGWEHW

SEQ ID NO: 437 - protein, 13 aa, Homo sapiens
  IgE  CDR3 amino acids
CARGFLMVAGEHW

SEQ ID NO: 438 - protein, 12 aa, Homo sapiens
  IgE  CDR3 amino acids
CARGFDGGWEHS

SEQ ID NO: 439 - protein, 12 aa, Homo sapiens
  IgE  CDR3 amino acids
CARGFLMVAGST

SEQ ID NO: 440 - protein, 12 aa, Homo sapiens
  IgE  CDR3 amino acids
CARGFVWWLGGT

SEQ ID NO: 441 - protein, 13 aa, Homo sapiens
  IgE  CDR3 amino acids
CARGFLMVAGSTG

SEQ ID NO: 442 - protein, 12 aa, Homo sapiens
  IgE  CDR3 amino acids
CARGFDGGSGAL

SEQ ID NO: 443 - protein, 11 aa, Homo sapiens
  IgE  CDR3 amino acids
CARGFDGAGST

SEQ ID NO: 444 - protein, 17 aa, Homo sapiens
  IGHD3-10  CDR3 amino acids
CARGRYAGGVIITALTP

SEQ ID NO: 445 - protein, 15 aa, Homo sapiens
  IGHD3-10  CDR3 amino acids
CARLPRMVRGNWFHP

SEQ ID NO: 446 - protein, 19 aa, Homo sapiens
  IGHD3-10  CDR3 amino acids
CARGAWAVRGVISWAGSTP

SEQ ID NO: 447 - protein, 21 aa, Homo sapiens
  IGHD3-10  CDR3 amino acids
CSREVGRDYYGSGVIEITWTS

SEQ ID NO: 448 - protein, 16 aa, Homo sapiens
  IGHD3-10  CDR3 amino acids
CAGSGSGSLLTTVWTP

SEQ ID NO: 449 - protein, 22 aa, Homo sapiens
  IGHD3-10  CDR3 amino acids
CSREVGRDYYGSGSYRNYMDVW

SEQ ID NO: 450 - protein, 20 aa, Homo sapiens
  IGHD3-10  CDR3 amino acids
CVSITNSLLWFGELLIFDCW

SEQ ID NO: 451 - protein, 20 aa, Homo sapiens
  IGHD3-22  CDR3 amino acids
CAKITSMIVVLIPTMMLLMS

SEQ ID NO: 452 - protein, 22 aa, Homo sapiens
  IGHD3-22  CDR3 amino acids
CARGSRARFSSDTSGYQYFDYW

SEQ ID NO: 453 - protein, 19 aa, Homo sapiens
  IGHD3-22  CDR3 amino acids
CARGVYLYYDSHAYSVLTT

SEQ ID NO: 454 - protein, 14 aa, Homo sapiens
  IGHD3-22  CDR3 amino acids
CARVNYYDSVVLTT

SEQ ID NO: 455 - protein, 15 aa, Homo sapiens
  IGHD3-22  CDR3 amino acids
CARVNYYDSSRIDYW

SEQ ID NO: 456 - protein, 21 aa, Homo sapiens
  IGHD3-22  CDR3 amino acids
CARLPPFNNDDSSSYALYLTT

SEQ ID NO: 457 - protein, 23 aa, Homo sapiens
  IGHD3-22  CDR3 amino acids
CARHSNYYYDTSGYRVLDAFDIW

SEQ ID NO: 458 - protein, 20 aa, Homo sapiens
  IGHD3-22  CDR3 amino acids
CARGGMDSYGYFYVGHYDYW

SEQ ID NO: 459 - protein, 7 aa, Homo sapiens
  IGHD3-22  CDR3 amino acids
CARDPDF

SEQ ID NO: 460 - protein, 20 aa, Homo sapiens
  IGHD3-22  CDR3 amino acids
CAKITSMIVVLTPTMMLLMS

SEQ ID NO: 461 - protein, 18 aa, Homo sapiens
  IGHD6-13  CDR3 amino acids
CTRQEESSAAGTGGTSSP

SEQ ID NO: 462 - protein, 16 aa, Homo sapiens
  IGHD6-13  CDR3 amino acids
CALCPTPIAAAGSVTT

SEQ ID NO: 463 - protein, 21 aa, Homo sapiens
  IGHD6-13  CDR3 amino acids
CATSEGDPVAAAGTKSWFDSW

SEQ ID NO: 464 - protein, 19 aa, Homo sapiens
  IGHD6-13  CDR3 amino acids
CARLALLYGSSRYGATLTT

SEQ ID NO: 465 - protein, 15 aa, Homo sapiens
  IGHD6-13  CDR3 amino acids
CARGPSSTWYSFDYW

SEQ ID NO: 466 - protein, 20 aa, Homo sapiens
  IGHD2-15  CDR3 amino acids
CAKKEFILVVVITMMSLLMS

SEQ ID NO: 467 - protein, 14 aa, Homo sapiens
  IGHD2-15  CDR3 amino acids
CAKDMTAKACSDYW

SEQ ID NO: 468 - protein, 20 aa, Homo sapiens
  IGHD2-15  CDR3 amino acids
CARVMGCRGGRCDFRAFDIW

SEQ ID NO: 469 - protein, 16 aa, Homo sapiens
  IGHD2-15  CDR3 amino acids
CARRFCSGGICYFLTT

SEQ ID NO: 470 - protein, 18 aa, Homo sapiens
  IGHD2-15  CDR3 amino acids
CALTGLNGRSCYSELLIS

SEQ ID NO: 471 - protein, 21 aa, Homo sapiens
  IGHD2-15  CDR3 amino acids
CAKEGVYFSGGNHYDVAFNVW

SEQ ID NO: 472 - protein, 17 aa, Homo sapiens
  IGHD3-3  CDR3 amino acids
CARPSRCCYSGGGRLTL

SEQ ID NO: 473 - protein, 23 aa, Homo sapiens
  IGHD3-3  CDR3 amino acids
CAHSVGFILDFWSGYQNNWFDPW

SEQ ID NO: 474 - protein, 17 aa, Homo sapiens
  IGHD3-3  CDR3 amino acids
CARPSRCCYVRGGRLTL

SEQ ID NO: 475 - protein, 18 aa, Homo sapiens
  IGHD3-3  CDR3 amino acids
CAMGPTIFGVVFLGSLTS

SEQ ID NO: 476 - protein, 23 aa, Homo sapiens
  IGHD3-3  CDR3 amino acids
CAHSVGFILDFWSGYQNNWFDPG

SEQ ID NO: 477 - protein, 22 aa, Homo sapiens
  IGHD3-3  CDR3 amino acids
CAHSVGFILDFGVVIRTTGSTP

SEQ ID NO: 478 - protein, 15 aa, Homo sapiens
  IGHD6-25  CDR3 amino acids
CARVKGGIAGMAWTS

SEQ ID NO: 479 - protein, 17 aa, Homo sapiens
  IGHD5-5  CDR3 amino acids
CARGVDTTMVRSTTLTT

SEQ ID NO: 480 - protein, 23 aa, Homo sapiens
  IGHD5-5  CDR3 amino acids
CARQDPYCSTSNCTMGGAMTLTT

SEQ ID NO: 481 - protein, 19 aa, Homo sapiens
  IGHD5-24  CDR3 amino acids
CARTDGIRDGYNLHRVLTT

SEQ ID NO: 482 - protein, 20 aa, Homo sapiens
  IGHD5-24  CDR3 amino acids
CARTDAIRDGYNLHRVFDYW

SEQ ID NO: 483 - protein, 18 aa, Homo sapiens
  IGHD5-24  CDR3 amino acids
CARGKRDAYNYYSHLDSW

SEQ ID NO: 484 - protein, 17 aa, Homo sapiens
  IGHD5-24  CDR3 amino acids
CARGKEMPTITTLILTP

SEQ ID NO: 485 - protein, 21 aa, Homo sapiens
  IGHD3-16  CDR3 amino acids
CVRQSPLDDVWGVFAPVGSTP

SEQ ID NO: 486 - protein, 21 aa, Homo sapiens
  IGHD3-16  CDR3 amino acids
CVRQSPLDDVWGVFAPVGSTL

SEQ ID NO: 487 - protein, 15 aa, Homo sapiens
  IGHD4-17  CDR3 amino acids
CARHPKPPTVTSATT

SEQ ID NO: 488 - protein, 15 aa, Homo sapiens
  IGHD4-17  CDR3 amino acids
CAKGENTVTTGQEYW

SEQ ID NO: 489 - protein, 14 aa, Homo sapiens
  IGHD4-17  CDR3 amino acids
CAKGENTVTTGQEY

SEQ ID NO: 490 - protein, 20 aa, Homo sapiens
  IGHD3-9  CDR3 amino acids
CAREGRNYDSLTGDPWFDPW

SEQ ID NO: 491 - protein, 23 aa, Homo sapiens
  IGHD2-2  CDR3 amino acids
CASRYCTSDRCLGASGKPSFDTW

SEQ ID NO: 492 - protein, 20 aa, Homo sapiens
  IGHD2-2  CDR3 amino acids
CARHSLAYCSTTSCAVFDYW

SEQ ID NO: 493 - protein, 27 aa, Homo sapiens
  IGHD2-2  CDR3 amino acids
CARHGFEGREVVPPAMNEYYYYYMDVW

SEQ ID NO: 494 - protein, 23 aa, Homo sapiens
  IGHD1-7  CDR3 amino acids
CARGDCTTINCNTHSDYYGLDVW

SEQ ID NO: 495 - protein, 16 aa, Homo sapiens
  IGHD1-7  CDR3 amino acids
CARTVGTGTTNGYLTS

SEQ ID NO: 496 - protein, 22 aa, Homo sapiens
  IGHD1-7  CDR3 amino acids
CAREIVLLSTATLTPTTTVWTS

SEQ ID NO: 497 - protein, 20 aa, Homo sapiens
  IGHD5-12  CDR3 amino acids
CARQDSGYDYGYYHNGMDVW

SEQ ID NO: 498 - protein, 16 aa, Homo sapiens
  IGHD4-23  CDR3 amino acids
CARGAGYGGNSGVRTT

SEQ ID NO: 499 - protein, 14 aa, Homo sapiens
  IGHD6-19  CDR3 amino acids
CARDLGSGWFRFDP

SEQ ID NO: 500 - protein, 14 aa, Homo sapiens
  IGHD6-19  CDR3 amino acids
CARDLGSGWFGSTP

SEQ ID NO: 501 - protein, 23 aa, Homo sapiens
  IGHD2-8  CDR3 amino acids
CAKSHHCTNGVCHPPRFGQRSTP

SEQ ID NO: 502 - protein, 15 aa, Homo sapiens
  IgG  CDR3 amino acids
CARGATVGVETGSTP

SEQ ID NO: 503 - protein, 13 aa, Homo sapiens
  IgG  CDR3 amino acids
CARKGSRHGGSTP

SEQ ID NO: 504 - protein, 15 aa, Homo sapiens
  IgG  CDR3 amino acids
CARQNGPSIGGGSTP

SEQ ID NO: 505 - protein, 15 aa, Homo sapiens
  IgG  CDR3 amino acids
CARGATPGAETGSTP

SEQ ID NO: 506 - protein, 14 aa, Homo sapiens
  IgG  CDR3 amino acids
CAKDTLGGMGGLTS

SEQ ID NO: 507 - protein, 27 aa, Homo sapiens
  IgG  CDR3 amino acids
CARVRVLPEGVLISLRPLGSTTITWTS

SEQ ID NO: 508 - protein, 17 aa, Homo sapiens
  IgG  CDR3 amino acids
CARGGPKKVVTAAHLSP

SEQ ID NO: 509 - protein, 14 aa, Homo sapiens
  IgG  CDR3 amino acids
CSTLGLGPPGGQTT

SEQ ID NO: 510 - protein, 17 aa, Homo sapiens
  IgG  CDR3 amino acids
CARDHYDTRGVRMLLIS

SEQ ID NO: 511 - protein, 15 aa, Homo sapiens
  IgG  CDR3 amino acids
CATDRDSSWGTSLTT

SEQ ID NO: 512 - protein, 23 aa, Homo sapiens
  IgG  CDR3 amino acids
CARMVRGGGRTSSGYYYYYMDVW

SEQ ID NO: 513 - protein, 15 aa, Homo sapiens
  IgG  CDR3 amino acids
CARDGVWDLPTTLTT

SEQ ID NO: 514 - protein, 19 aa, Homo sapiens
  IgG  CDR3 amino acids
CVRMGPPCQLAGRSSSLTS

SEQ ID NO: 515 - protein, 23 aa, Homo sapiens
  IgG  CDR3 amino acids
CTMATVGHGLRRCFGKSTATLTS

SEQ ID NO: 516 - protein, 16 aa, Homo sapiens
  IgG  CDR3 amino acids
CARRGGSTVTTGTSIS

SEQ ID NO: 517 - protein, 14 aa, Homo sapiens
  IgG  CDR3 amino acids
CSTLGLGPPGGLTT

SEQ ID NO: 518 - protein, 9 aa, Homo sapiens
  IgG  CDR3 amino acids
CMGPGETAI

SEQ ID NO: 519 - protein, 17 aa, Homo sapiens
  IgG  CDR3 amino acids
CARVSMIRFRVWGLWTS

SEQ ID NO: 520 - protein, 14 aa, Homo sapiens
  IgG  CDR3 amino acids
CARVQRGAVVIPTT

SEQ ID NO: 521 - protein, 18 aa, Homo sapiens
  IgG  CDR3 amino acids
CARRRYNDLGAPNWVDPW

SEQ ID NO: 522 - protein, 22 aa, Homo sapiens
  IgG  CDR3 amino acids
CARGEDCGGGRCNNLPTTVWTS

SEQ ID NO: 523 - protein, 17 aa, Homo sapiens
  IgG  CDR3 amino acids
CAKRKLAPPRKFTTLTT

SEQ ID NO: 524 - protein, 22 aa, Homo sapiens
  IgG  CDR3 amino acids
CATLEGGAPPDLRRAEAFLLIS

SEQ ID NO: 525 - protein, 23 aa, Homo sapiens
  IgG  CDR3 amino acids
CARQDPYCSTSNCTMGGAMTLTT

SEQ ID NO: 526 - protein, 23 aa, Homo sapiens
  IgG  CDR3 amino acids
CARGKDCGGGRCNNVPYYGMDVW

SEQ ID NO: 527 - protein, 16 aa, Homo sapiens
  IgG  CDR3 amino acids
CAKDGHKLTGTTTRTS

SEQ ID NO: 528 - protein, 15 aa, Homo sapiens
  IgG  CDR3 amino acids
CAILPETQWYPRLTT

SEQ ID NO: 529 - protein, 15 aa, Homo sapiens
  IgG  CDR3 amino acids
CVRDLGAITPVFSTS

SEQ ID NO: 530 - protein, 13 aa, Homo sapiens
  IgG  CDR3 amino acids
CVHRPRWLNVVPT

SEQ ID NO: 531 - protein, 13 aa, Homo sapiens
  IgG  CDR3 amino acids
CVHRPRWLNVVPN

SEQ ID NO: 532 - protein, 20 aa, Homo sapiens
  IgG  CDR3 amino acids
CARSFVVKVHAHCGAVLSST

SEQ ID NO: 533 - protein, 21 aa, Homo sapiens
  IgG  CDR3 amino acids
CARRLNVAVVVPAYVGWFDPW

SEQ ID NO: 534 - protein, 15 aa, Homo sapiens
  IgG  CDR3 amino acids
CARLGKNHSQGVDYW

SEQ ID NO: 535 - protein, 16 aa, Homo sapiens
  IgG  CDR3 amino acids
CARGPGGVWDRLSLTS

SEQ ID NO: 536 - protein, 22 aa, Homo sapiens
  IgG  CDR3 amino acids
CARGKDCGGGRCNNVPTTGWTS

SEQ ID NO: 537 - protein, 24 aa, Homo sapiens
  IgG  CDR3 amino acids
CARGFMVQASSVRLKRGQFLADSW

SEQ ID NO: 538 - protein, 14 aa, Homo sapiens
  IgG  CDR3 amino acids
CARGDWGTVTLATT

SEQ ID NO: 539 - protein, 16 aa, Homo sapiens
  IgG  CDR3 amino acids
CARDWEWQQRLNYFDP

SEQ ID NO: 540 - protein, 21 aa, Homo sapiens
  IgG  CDR3 amino acids
CARDNQPWRDARNLGGAFDVW

SEQ ID NO: 541 - protein, 22 aa, Homo sapiens
  IgG  CDR3 amino acids
CARDGLRPPPFMVTIQRGGLTT

SEQ ID NO: 542 - protein, 23 aa, Homo sapiens
  IgG  CDR3 amino acids
CARAVGGFNSGWPSIGVPARSTP

SEQ ID NO: 543 - protein, 23 aa, Homo sapiens
  IgG  CDR3 amino acids
CARAVGGFNSGWPSIGVPARSTL

SEQ ID NO: 544 - protein, 17 aa, Homo sapiens
  IgG  CDR3 amino acids
CAKVDETVVLPAALLTP

SEQ ID NO: 545 - protein, 23 aa, Homo sapiens
  IgG  CDR3 amino acids
CAKSPKPWSQLVSTPIMPTPWTS

SEQ ID NO: 546 - protein, 14 aa, Homo sapiens
  IgG  CDR3 amino acids
CVRRAAGGRSGLTT

SEQ ID NO: 547 - protein, 16 aa, Homo sapiens
  IgG  CDR3 amino acids
CVRPPPTVPGTAGSTP

SEQ ID NO: 548 - protein, 13 aa, Homo sapiens
  IgG  CDR3 amino acids
CVRESTFYYFGPW

SEQ ID NO: 549 - protein, 26 aa, Homo sapiens
  IgG  CDR3 amino acids
CVRDDDYSRTWYMGQGASSDYGMDVW

SEQ ID NO: 550 - protein, 14 aa, Homo sapiens
  IgG  CDR3 amino acids
CVKWVSGVLTSLTT

SEQ ID NO: 551 - protein, 12 aa, Homo sapiens
  IgG  CDR3 amino acids
CVALFVPAGSTL

SEQ ID NO: 552 - protein, 24 aa, Homo sapiens
  IgG  CDR3 amino acids
CTMATVGHGATTLFREVHRNTDFW

SEQ ID NO: 553 - protein, 14 aa, Homo sapiens
  IgG  CDR3 amino acids
CSTLGLGPRGADYW

SEQ ID NO: 554 - protein, 11 aa, Homo sapiens
  IgG  CDR3 amino acids
CSRTGGRLLIS

SEQ ID NO: 555 - protein, 12 aa, Homo sapiens
  IgG  CDR3 amino acids
CSKVGRILKLIT

SEQ ID NO: 556 - protein, 11 aa, Homo sapiens
  IgG  CDR3 amino acids
CKVAVEMVLMY

SEQ ID NO: 557 - protein, 12 aa, Homo sapiens
  IgG  CDR3 amino acids
CGKFLGTTVASS

SEQ ID NO: 558 - protein, 18 aa, Homo sapiens
  IgG  CDR3 amino acids
CATSGRSSAWYPDVFDIW

SEQ ID NO: 559 - protein, 18 aa, Homo sapiens
  IgG  CDR3 amino acids
CATNYCRGISCYPAPLTT

SEQ ID NO: 560 - protein, 22 aa, Homo sapiens
  IgG  CDR3 amino acids
CATLTGGAPPDLRRAEAFLLIS

SEQ ID NO: 561 - protein, 14 aa, Homo sapiens
  IgG  CDR3 amino acids
CATEGTGAVTPFTT

SEQ ID NO: 562 - protein, 11 aa, Homo sapiens
  IgG  CDR3 amino acids
CATAPGGTSYT

SEQ ID NO: 563 - protein, 14 aa, Homo sapiens
  IgG  CDR3 amino acids
CASRPSWGSSFDFW

SEQ ID NO: 564 - protein, 13 aa, Homo sapiens
  IgG  CDR3 amino acids
CASRPPGAAALTS

SEQ ID NO: 565 - protein, 13 aa, Homo sapiens
  IgG  CDR3 amino acids
CASMIALHHTLTS

SEQ ID NO: 566 - protein, 15 aa, Homo sapiens
  IgG  CDR3 amino acids
CARYSPVDPSTLDFW

SEQ ID NO: 567 - protein, 16 aa, Homo sapiens
  IgG  CDR3 amino acids
CARVLDSSAHWYFDDW

SEQ ID NO: 568 - protein, 17 aa, Homo sapiens
  IgG  CDR3 amino acids
CARRRYNDLGAPTGSTP

SEQ ID NO: 569 - protein, 15 aa, Homo sapiens
  IgG  CDR3 amino acids
CARQNGPSIGGGSTL

SEQ ID NO: 570 - protein, 18 aa, Homo sapiens
  IgG  CDR3 amino acids
CARQHSEWEILRLVFDHW

SEQ ID NO: 571 - protein, 22 aa, Homo sapiens
  IgG  CDR3 amino acids
CARMVREEAERRPAIIITTWTS

SEQ ID NO: 572 - protein, 15 aa, Homo sapiens
  IgG  CDR3 amino acids
CARLPRMVRVTGSTP

SEQ ID NO: 573 - protein, 15 aa, Homo sapiens
  IgG  CDR3 amino acids
CARIDYVSTWYYDQW

SEQ ID NO: 574 - protein, 16 aa, Homo sapiens
  IgG  CDR3 amino acids
CARICAEREFLSLLTP

SEQ ID NO: 575 - protein, 17 aa, Homo sapiens
  IgG  CDR3 amino acids
CARGPGWGMGSTKFDCW

SEQ ID NO: 576 - protein, 20 aa, Homo sapiens
  IgG  CDR3 amino acids
CARGGKSATGANYHQFFDCW

SEQ ID NO: 577 - protein, 22 aa, Homo sapiens
  IgG  CDR3 amino acids
CARGDCTTINCNTHSTTTVWTS

SEQ ID NO: 578 - protein, 15 aa, Homo sapiens
  IgG  CDR3 amino acids
CARGATVGVETGSTL

SEQ ID NO: 579 - protein, 15 aa, Homo sapiens
  IgG  CDR3 amino acids
CARGATLGVETGWTP

SEQ ID NO: 580 - protein, 17 aa, Homo sapiens
  IgG  CDR3 amino acids
CAREYYGILYGYYFDYW

SEQ ID NO: 581 - protein, 17 aa, Homo sapiens
  IgG  CDR3 amino acids
CARDWEWQQRLNYFDPW

SEQ ID NO: 582 - protein, 20 aa, Homo sapiens
  IgG  CDR3 amino acids
CARDNQPWRDARNLGVHLMC

SEQ ID NO: 583 - protein, 16 aa, Homo sapiens
  IgG  CDR3 amino acids
CARDHYYDERNQGPDW

SEQ ID NO: 584 - protein, 15 aa, Homo sapiens
  IgG  CDR3 amino acids
CARDGGLAGTGTLEY

SEQ ID NO: 585 - protein, 16 aa, Homo sapiens
  IgG  CDR3 amino acids
CARAGLVLGPYGMDIW

SEQ ID NO: 586 - protein, 12 aa, Homo sapiens
  IgG  CDR3 amino acids
CARAGGHGTWTS

SEQ ID NO: 587 - protein, 24 aa, Homo sapiens
  IgG  CDR3 amino acids
CAKVAETLVSTGFDSYYAYSMDVW

SEQ ID NO: 588 - protein, 18 aa, Homo sapiens
  IgG  CDR3 amino acids
CAKTYDYGSRGFSILLIS

SEQ ID NO: 589 - protein, 15 aa, Homo sapiens
  IgG  CDR3 amino acids
CAKSLRVGGDVFEIW

SEQ ID NO: 590 - protein, 9 aa, Homo sapiens
  IgG  CDR3 amino acids
CAKSDYFDP

SEQ ID NO: 591 - protein, 17 aa, Homo sapiens
  IgG  CDR3 amino acids
CAKGRGRLVTIATTLTT

SEQ ID NO: 592 - protein, 16 aa, Homo sapiens
  IgG  CDR3 amino acids
CAKGAGRRAAGKFLTT

SEQ ID NO: 593 - protein, 27 aa, Homo sapiens
  IgG  CDR3 amino acids
CAKAKRRSLGMQTLPTLRGRSDGFDVW

SEQ ID NO: 594 - protein, 17 aa, Homo sapiens
  IgG  CDR3 amino acids
CAKAHFPGDLPSFSSIS

SEQ ID NO: 595 - protein, 16 aa, Homo sapiens
  IgG  CDR3 amino acids
CAKADCGTGCFIVDDW

SEQ ID NO: 596 - protein, 16 aa, Homo sapiens
  IgG  CDR3 amino acids
CAHQQWRPGRRGFDYW

SEQ ID NO: 597 - protein, 15 aa, Homo sapiens
  IGHD6-13  CDR3 amino acids
CARTYSSWYRGPLSP

SEQ ID NO: 598 - protein, 18 aa, Homo sapiens
  IGHD6-13  CDR3 amino acids
CTRQEESSAAGTGGTSSP

SEQ ID NO: 599 - protein, 18 aa, Homo sapiens
  IGHD6-13  CDR3 amino acids
CARPIAAAGSRGFGTLTT

SEQ ID NO: 600 - protein, 18 aa, Homo sapiens
  IGHD6-13  CDR3 amino acids
CAQRRPSSSTWYAPTLTT

SEQ ID NO: 601 - protein, 18 aa, Homo sapiens
  IGHD6-13  CDR3 amino acids
CAQRRPNSSTWYAPTLTT

SEQ ID NO: 602 - protein, 23 aa, Homo sapiens
  IGHD6-13  CDR3 amino acids
CARDLGGYSSSWSTNYYYYMDVW

SEQ ID NO: 603 - protein, 19 aa, Homo sapiens
  IGHD6-13  CDR3 amino acids
CAKVNWGIAAAGSYAFDIW

SEQ ID NO: 604 - protein, 21 aa, Homo sapiens
  IGHD6-13  CDR3 amino acids
CAHRVRGMTSSSWYYGTFDYW

SEQ ID NO: 605 - protein, 14 aa, Homo sapiens
  IGHD6-13  CDR3 amino acids
CVRPGATAGTLLTV

SEQ ID NO: 606 - protein, 16 aa, Homo sapiens
  IGHD6-13  CDR3 amino acids
CARTYSSWYRGGPLSP

SEQ ID NO: 607 - protein, 22 aa, Homo sapiens
  IGHD6-13  CDR3 amino acids
CARPQRYSSSWYDDYYYGMDVW

SEQ ID NO: 608 - protein, 19 aa, Homo sapiens
  IGHD6-13  CDR3 amino acids
CARPIAAAGSRGVRYFDYW

SEQ ID NO: 609 - protein, 23 aa, Homo sapiens
  IGHD6-13  CDR3 amino acids
CARGVLAPLYSSTLKLRFSVWTS

SEQ ID NO: 610 - protein, 18 aa, Homo sapiens
  IGHD6-13  CDR3 amino acids
CARGLVAAAGTRRGWFTP

SEQ ID NO: 611 - protein, 19 aa, Homo sapiens
  IGHD6-13  CDR3 amino acids
CARGLVAAAGTRRGWFDPW

SEQ ID NO: 612 - protein, 17 aa, Homo sapiens
  IGHD6-13  CDR3 amino acids
CARDSGQIVAAVTLDYW

SEQ ID NO: 613 - protein, 19 aa, Homo sapiens
  IGHD6-13  CDR3 amino acids
CARAPSIPVAGIGYHFDHW

SEQ ID NO: 614 - protein, 19 aa, Homo sapiens
  IGHD6-13  CDR3 amino acids
CAQRRPNSSTWYRPLTLTT

SEQ ID NO: 615 - protein, 19 aa, Homo sapiens
  IGHD6-13  CDR3 amino acids
CAKVNWGYSSCWFLRFLIS

SEQ ID NO: 616 - protein, 15 aa, Homo sapiens
  IGHD6-13  CDR3 amino acids
CAKEGVPIAAPGLTT

SEQ ID NO: 617 - protein, 13 aa, Homo sapiens
  IGHD6-13  CDR3 amino acids
CAHSRAAAGSLTT

SEQ ID NO: 618 - protein, 14 aa, Homo sapiens
  IGHD6-13  CDR3 amino acids
CAHSRAAAGSFDYW

SEQ ID NO: 619 - protein, 21 aa, Homo sapiens
  IGHD6-13  CDR3 amino acids
CAHRVRGNDKQQLVLWGPLTT

SEQ ID NO: 620 - protein, 20 aa, Homo sapiens
  IGHD6-13  CDR3 amino acids
CAHRVRGMTSSSWYYGTLTT

SEQ ID NO: 621 - protein, 10 aa, Homo sapiens
  IGHD2-15  CDR3 amino acids
CARVEGGLTT

SEQ ID NO: 622 - protein, 17 aa, Homo sapiens
  IGHD2-15  CDR3 amino acids
CAKGWTAARGALNTSST

SEQ ID NO: 623 - protein, 12 aa, Homo sapiens
  IGHD2-15  CDR3 amino acids
CARFWSGVGLTT

SEQ ID NO: 624 - protein, 21 aa, Homo sapiens
  IGHD2-15  CDR3 amino acids
CAREVYLYCNGGRCYWRGSSP

SEQ ID NO: 625 - protein, 22 aa, Homo sapiens
  IGHD2-15  CDR3 amino acids
CARSEYCRGGNCYFNGYYFDSW

SEQ ID NO: 626 - protein, 18 aa, Homo sapiens
  IGHD2-15  CDR3 amino acids
CARAPYCSGGSCYLFDYW

SEQ ID NO: 627 - protein, 22 aa, Homo sapiens
  IGHD2-15  CDR3 amino acids
CARGFVVVVTATLGTTITPWTS

SEQ ID NO: 628 - protein, 18 aa, Homo sapiens
  IGHD2-15  CDR3 amino acids
CARDLCGGSCSRTTGSTP

SEQ ID NO: 629 - protein, 19 aa, Homo sapiens
  IGHD2-15  CDR3 amino acids
CARAGYCSGGSCYGWFDPW

SEQ ID NO: 630 - protein, 17 aa, Homo sapiens
  IGHD2-15  CDR3 amino acids
CAKTKTGTTKINTTLTT

SEQ ID NO: 631 - protein, 19 aa, Homo sapiens
  IGHD2-15  CDR3 amino acids
CAKNGILTGWVNGYTTLTT

SEQ ID NO: 632 - protein, 21 aa, Homo sapiens
  IGHD2-15  CDR3 amino acids
CAKGQTTAILGSTDFNWFDPW

SEQ ID NO: 633 - protein, 19 aa, Homo sapiens
  IGHD2-15  CDR3 amino acids
CAKFHLQPSLLMVRRSPTS

SEQ ID NO: 634 - protein, 17 aa, Homo sapiens
  IGHD3-22  CDR3 amino acids
CARDPRGAVGITTGPTH

SEQ ID NO: 635 - protein, 17 aa, Homo sapiens
  IGHD3-22  CDR3 amino acids
CARGSPPGAVGFIGSTP

SEQ ID NO: 636 - protein, 20 aa, Homo sapiens
  IGHD3-22  CDR3 amino acids
CAKDMGGITMIVVVMISLTT

SEQ ID NO: 637 - protein, 16 aa, Homo sapiens
  IGHD3-22  CDR3 amino acids
CARARRGHGSTTTWTS

SEQ ID NO: 638 - protein, 12 aa, Homo sapiens
  IGHD3-22  CDR3 amino acids
CARDPPRMLLIS

SEQ ID NO: 639 - protein, 17 aa, Homo sapiens
  IGHD3-22  CDR3 amino acids
CARDLSYYDSSGYYAYW

SEQ ID NO: 640 - protein, 15 aa, Homo sapiens
  IGHD3-22  CDR3 amino acids
CATYKYYDSSGFMTT

SEQ ID NO: 641 - protein, 16 aa, Homo sapiens
  IGHD3-22  CDR3 amino acids
CATYKYYDSSGFHDYW

SEQ ID NO: 642 - protein, 17 aa, Homo sapiens
  IGHD3-22  CDR3 amino acids
CARDLSYYDSSGYYAYV

SEQ ID NO: 643 - protein, 21 aa, Homo sapiens
  IGHD3-22  CDR3 amino acids
CAHRRPYYYDSSGYYYAFDYW

SEQ ID NO: 644 - protein, 8 aa, Homo sapiens
  IGHD3-22  CDR3 amino acids
CLTMIVPT

SEQ ID NO: 645 - protein, 21 aa, Homo sapiens
  IGHD3-22  CDR3 amino acids
CATVTGGSSGYYYHVYYFDYW

SEQ ID NO: 646 - protein, 17 aa, Homo sapiens
  IGHD3-22  CDR3 amino acids
CARVRYSGGILGLPLTT

SEQ ID NO: 647 - protein, 21 aa, Homo sapiens
  IGHD3-22  CDR3 amino acids
CARGRRGIVVVIPKEVRFDYW

SEQ ID NO: 648 - protein, 19 aa, Homo sapiens
  IGHD3-22  CDR3 amino acids
CARGIWVSTGYYRYYFDNW

SEQ ID NO: 649 - protein, 21 aa, Homo sapiens
  IGHD3-22  CDR3 amino acids
CAREGYDSGGYYYEVEAFDIW

SEQ ID NO: 650 - protein, 22 aa, Homo sapiens
  IGHD3-22  CDR3 amino acids
CARDAGPITTTVAGIIMRLLTF

SEQ ID NO: 651 - protein, 20 aa, Homo sapiens
  IGHD3-22  CDR3 amino acids
CAHRRPITMIVVVITMPLTT

SEQ ID NO: 652 - protein, 16 aa, Homo sapiens
  IGHD5-5  CDR3 amino acids
CARGGGKDLLASYLTT

SEQ ID NO: 653 - protein, 14 aa, Homo sapiens
  IGHD5-5  CDR3 amino acids
CTSRGYSYGAPRWD

SEQ ID NO: 654 - protein, 23 aa, Homo sapiens
  IGHD5-5  CDR3 amino acids
CARRWGRGRDTAMNLTTTTVWTS

SEQ ID NO: 655 - protein, 13 aa, Homo sapiens
  IGHD5-5  CDR3 amino acids
CSRGGPGTAMVST

SEQ ID NO: 656 - protein, 23 aa, Homo sapiens
  IGHD5-5  CDR3 amino acids
CARRGGGGGDTAMNLTTTTVWTS

SEQ ID NO: 657 - protein, 15 aa, Homo sapiens
  IGHD5-5  CDR3 amino acids
CARHGDSFVQPRRTT

SEQ ID NO: 658 - protein, 13 aa, Homo sapiens
  IGHD5-5  CDR3 amino acids
CAKHDGQSNTLTA

SEQ ID NO: 659 - protein, 16 aa, Homo sapiens
  IGHD5-5  CDR3 amino acids
CATNTAMGFNEAVLIS

SEQ ID NO: 660 - protein, 16 aa, Homo sapiens
  IGHD5-5  CDR3 amino acids
CARRGYSSMGIWDLST

SEQ ID NO: 661 - protein, 23 aa, Homo sapiens
  IGHD5-5  CDR3 amino acids
CARRGGRGRDTAMNLTTTTVWTS

SEQ ID NO: 662 - protein, 19 aa, Homo sapiens
  IGHD5-5  CDR3 amino acids
CARQGSRLFHYYYYYMDVW

SEQ ID NO: 663 - protein, 15 aa, Homo sapiens
  IGHD5-5  CDR3 amino acids
CARHKPGYSYVFLTT

SEQ ID NO: 664 - protein, 13 aa, Homo sapiens
  IGHD3-10  CDR3 amino acids
CGREGAGSAPWTS

SEQ ID NO: 665 - protein, 20 aa, Homo sapiens
  IGHD3-10  CDR3 amino acids
CARHRITMVRELSYTTTWTS

SEQ ID NO: 666 - protein, 22 aa, Homo sapiens
  IGHD3-10  CDR3 amino acids
CARDSDQQHGVRGVIPMAVWTS

SEQ ID NO: 667 - protein, 19 aa, Homo sapiens
  IGHD3-10  CDR3 amino acids
CATTPLMTLVRGLTTTWTS

SEQ ID NO: 668 - protein, 20 aa, Homo sapiens
  IGHD3-10  CDR3 amino acids
CARHQVSMVRGVTRSTGSTP

SEQ ID NO: 669 - protein, 21 aa, Homo sapiens
  IGHD3-10  CDR3 amino acids
CARDEWFGESEVTNLDAFDIW

SEQ ID NO: 670 - protein, 21 aa, Homo sapiens
  IGHD3-10  CDR3 amino acids
CAHSEGRITMVRGVIGPFDYW

SEQ ID NO: 671 - protein, 17 aa, Homo sapiens
  IGHD3-10  CDR3 amino acids
CARGQTYGSGPRGFDPW

SEQ ID NO: 672 - protein, 22 aa, Homo sapiens
  IGHD3-10  CDR3 amino acids
CARGLYGSGSYYIKRRKTGSTP

SEQ ID NO: 673 - protein, 14 aa, Homo sapiens
  IGHD3-10  CDR3 amino acids
CARAMVRGVLALTT

SEQ ID NO: 674 - protein, 18 aa, Homo sapiens
  IGHD3-10  CDR3 amino acids
CAKVGVGSMTMDRGVMTT

SEQ ID NO: 675 - protein, 16 aa, Homo sapiens
  IGHD3-3  CDR3 amino acids
CARDPFGVVISTVWTS

SEQ ID NO: 676 - protein, 21 aa, Homo sapiens
  IGHD3-3  CDR3 amino acids
CARDRGRVLRFCPQGVPSLTT

SEQ ID NO: 677 - protein, 21 aa, Homo sapiens
  IGHD3-3  CDR3 amino acids
CASQTYYDFGVVIILLTTLTT

SEQ ID NO: 678 - protein, 14 aa, Homo sapiens
  IGHD3-3  CDR3 amino acids
CASLDFGVVIILTS

SEQ ID NO: 679 - protein, 22 aa, Homo sapiens
  IGHD3-3  CDR3 amino acids
CARHRSITILEWFVNHETGSTP

SEQ ID NO: 680 - protein, 20 aa, Homo sapiens
  IGHD3-3  CDR3 amino acids
CAQSHYDFGVVIILIPGSTP

SEQ ID NO: 681 - protein, 20 aa, Homo sapiens
  IGHD3-3  CDR3 amino acids
CARGSPHYDFGVEIRTGSTP

SEQ ID NO: 682 - protein, 17 aa, Homo sapiens
  IGHD3-3  CDR3 amino acids
CARDPLWSGYFYGMDVW

SEQ ID NO: 683 - protein, 16 aa, Homo sapiens
  IGHD3-3  CDR3 amino acids
CARVGTYDFGVVMSNS

SEQ ID NO: 684 - protein, 23 aa, Homo sapiens
  IGHD3-3  CDR3 amino acids
CARHRSITIFGVVRKSRNWFDPW

SEQ ID NO: 685 - protein, 24 aa, Homo sapiens
  IGHD3-3  CDR3 amino acids
CARDRFSLNSAFGVVEGSYWFDPW

SEQ ID NO: 686 - protein, 21 aa, Homo sapiens
  IGHD3-3  CDR3 amino acids
CAQSHYDFWSGYYSNTGFDPW

SEQ ID NO: 687 - protein, 17 aa, Homo sapiens
  IGHD1-26  CDR3 amino acids
CASVGGTRGPGDPGLGT

SEQ ID NO: 688 - protein, 14 aa, Homo sapiens
  IGHD1-26  CDR3 amino acids
CAKGGFIVGATLTT

SEQ ID NO: 689 - protein, 15 aa, Homo sapiens
  IGHD1-26  CDR3 amino acids
CAKEGGRIVGATMTT

SEQ ID NO: 690 - protein, 18 aa, Homo sapiens
  IGHD1-26  CDR3 amino acids
CARVRYSGRYSRSTVDYW

SEQ ID NO: 691 - protein, 18 aa, Homo sapiens
  IGHD1-26  CDR3 amino acids
CARLKCGLTTCLHKTLIS

SEQ ID NO: 692 - protein, 14 aa, Homo sapiens
  IGHD1-26  CDR3 amino acids
CARDSVGATTTDYW

SEQ ID NO: 693 - protein, 15 aa, Homo sapiens
  IGHD6-19  CDR3 amino acids
CAHPGSGWPLTTLTT

SEQ ID NO: 694 - protein, 15 aa, Homo sapiens
  IGHD6-19  CDR3 amino acids
CARGCSVAGTGSSTP

SEQ ID NO: 695 - protein, 15 aa, Homo sapiens
  IGHD6-19  CDR3 amino acids
CARARITVAAPYDYW

SEQ ID NO: 696 - protein, 13 aa, Homo sapiens
  IGHD6-19  CDR3 amino acids
CARLISSGWYLTT

SEQ ID NO: 697 - protein, 25 aa, Homo sapiens
  IGHD6-19  CDR3 amino acids
CARTSLEQQLVFMTENSSGWSFDYW

SEQ ID NO: 698 - protein, 17 aa, Homo sapiens
  IGHD6-19  CDR3 amino acids
CARGGIAVAGTRIKTTT

SEQ ID NO: 699 - protein, 12 aa, Homo sapiens
  IGHD6-19  CDR3 amino acids
CARDQQWLPDYV

SEQ ID NO: 700 - protein, 14 aa, Homo sapiens
  IGHD6-19  CDR3 amino acids
CARARITVAAPYDY

SEQ ID NO: 701 - protein, 14 aa, Homo sapiens
  IGHD6-19  CDR3 amino acids
CARARITVAAPMTT

SEQ ID NO: 702 - protein, 16 aa, Homo sapiens
  IGHD6-19  CDR3 amino acids
CAKGVGSGWYDFFDYW

SEQ ID NO: 703 - protein, 19 aa, Homo sapiens
  IGHD6-19  CDR3 amino acids
CAKGPREQWLAPYWYFDLW

SEQ ID NO: 704 - protein, 14 aa, Homo sapiens
  IGHD3-9  CDR3 amino acids
CARGGSLVLDVLTT

SEQ ID NO: 705 - protein, 14 aa, Homo sapiens
  IGHD3-9  CDR3 amino acids
CARGGSLMLDVLTT

SEQ ID NO: 706 - protein, 17 aa, Homo sapiens
  IGHD3-9  CDR3 amino acids
CASGPYFDWLLTYMDVW

SEQ ID NO: 707 - protein, 23 aa, Homo sapiens
  IGHD3-9  CDR3 amino acids
CARGPLYDILTGPTPTTTTTWTS

SEQ ID NO: 708 - protein, 14 aa, Homo sapiens
  IGHD3-9  CDR3 amino acids
CARGGSIVLDVLTT

SEQ ID NO: 709 - protein, 12 aa, Homo sapiens
  IGHD2-8  CDR3 amino acids
CAKWGGNSSWKS

SEQ ID NO: 710 - protein, 25 aa, Homo sapiens
  IGHD2-8  CDR3 amino acids
CARRSWCTNGVCYYISVALVTGSTP

SEQ ID NO: 711 - protein, 20 aa, Homo sapiens
  IGHD2-8  CDR3 amino acids
CARGSRYCTNGVCYFWFDPW

SEQ ID NO: 712 - protein, 29 aa, Homo sapiens
  IGHD2-8  CDR3 amino acids
CARDVLGYCTATACWRGGPNHYYYGMDVW

SEQ ID NO: 713 - protein, 14 aa, Homo sapiens
  IGHD5-24  CDR3 amino acids
CARGIEMATILLTT

SEQ ID NO: 714 - protein, 14 aa, Homo sapiens
  IGHD5-24  CDR3 amino acids
CARGSRWLQFFDYW

SEQ ID NO: 715 - protein, 18 aa, Homo sapiens
  IGHD5-24  CDR3 amino acids
CAKGGERWLQSGATTLTT

SEQ ID NO: 716 - protein, 17 aa, Homo sapiens
  IGHD6-6  CDR3 amino acids
CTRGLVIEDIAARPGGA

SEQ ID NO: 717 - protein, 20 aa, Homo sapiens
  IGHD6-6  CDR3 amino acids
CASDRGVQLVQDYYFGMDVW

SEQ ID NO: 718 - protein, 18 aa, Homo sapiens
  IGHD5-12  CDR3 amino acids
CARNARGGVATIFRGSTP

SEQ ID NO: 719 - protein, 22 aa, Homo sapiens
  IGHD5-12  CDR3 amino acids
CARIQVATIDPKPKRLPSVWTS

SEQ ID NO: 720 - protein, 19 aa, Homo sapiens
  IGHD4-17  CDR3 amino acids
CARDWNGDYDYYYYGMDVW

SEQ ID NO: 721 - protein, 18 aa, Homo sapiens
  IGHD4-17  CDR3 amino acids
CARDWNGDYTTTTTVWTS

SEQ ID NO: 722 - protein, 16 aa, Homo sapiens
  IGHD2-2  CDR3 amino acids
CARDRSSTSCCHFDYL

SEQ ID NO: 723 - protein, 19 aa, Homo sapiens
  IGHD2-21  CDR3 amino acids
CARGPAYCGSDCYSYFQHW

SEQ ID NO: 724 - protein, 14 aa, Homo sapiens
  IGHD4-23  CDR3 amino acids
CARGGDYGGTPLTT

SEQ ID NO: 725 - protein, 17 aa, Homo sapiens
  IGHD1-7  CDR3 amino acids
CARDGPPRITGTTEVTT

SEQ ID NO: 726 - protein, 13 aa, Homo sapiens
  IGHD1-1  CDR3 amino acids
CARRVGASGTSIS

SEQ ID NO: 727 - protein, 19 aa, Homo sapiens
  IGHD3-16  CDR3 amino acids
CARAHYDYVWGSYRSPPTT

SEQ ID NO: 728 - protein, 17 aa, Homo sapiens
  IGHD4-4  CDR3 amino acids
CARPVTTGTHRGYFDLW

SEQ ID NO: 729 - protein, 17 aa, Homo sapiens
  IgM  CDR3 amino acids
CASVGGTRVPGDPGLGT

SEQ ID NO: 730 - protein, 19 aa, Homo sapiens
  IgM  CDR3 amino acids
CAHLTITFGEFSERMLSTS

SEQ ID NO: 731 - protein, 12 aa, Homo sapiens
  IgM  CDR3 amino acids
CARLGYYDRRTT

SEQ ID NO: 732 - protein, 13 aa, Homo sapiens
  IgM  CDR3 amino acids
CAGEVVIWNSMTT

SEQ ID NO: 733 - protein, 13 aa, Homo sapiens
  IgM  CDR3 amino acids
CARGARGDNSTMT

SEQ ID NO: 734 - protein, 15 aa, Homo sapiens
  IgM  CDR3 amino acids
CARGGSRWPRTTLTT

SEQ ID NO: 735 - protein, 14 aa, Homo sapiens
  IgM  CDR3 amino acids
CARMGGPPTGTSIS

SEQ ID NO: 736 - protein, 11 aa, Homo sapiens
  IgM  CDR3 amino acids
CVRGGLYTIPT

SEQ ID NO: 737 - protein, 18 aa, Homo sapiens
  IgM  CDR3 amino acids
CARGGCGNYCPTTTSWTS

SEQ ID NO: 738 - protein, 14 aa, Homo sapiens
  IgM  CDR3 amino acids
CARRDSSRGTTLTT

SEQ ID NO: 739 - protein, 15 aa, Homo sapiens
  IgM  CDR3 amino acids
CARTTGTTTTTTWTS

SEQ ID NO: 740 - protein, 16 aa, Homo sapiens
  IgM  CDR3 amino acids
CARLSRYSNSPPSLTT

SEQ ID NO: 741 - protein, 16 aa, Homo sapiens
  IgM  CDR3 amino acids
CARHLGVRGPWALFIS

SEQ ID NO: 742 - protein, 12 aa, Homo sapiens
  IgM  CDR3 amino acids
CARDPPRMLLIS

SEQ ID NO: 743 - protein, 9 aa, Homo sapiens
  IgM  CDR3 amino acids
CAKGDIVTT

SEQ ID NO: 744 - protein, 16 aa, Homo sapiens
  IgM  CDR3 amino acids
CARGGGVSSRRITSTP

SEQ ID NO: 745 - protein, 11 aa, Homo sapiens
  IgM  CDR3 amino acids
CAREGVRSLTT

SEQ ID NO: 746 - protein, 15 aa, Homo sapiens
  IgM  CDR3 amino acids
CAKDKTYDTHGYSPF

SEQ ID NO: 747 - protein, 17 aa, Homo sapiens
  IgM  CDR3 amino acids
CASLLLPTVTGGVLLIS

SEQ ID NO: 748 - protein, 13 aa, Homo sapiens
  IgM  CDR3 amino acids
CARDYGATGSLDC

SEQ ID NO: 749 - protein, 16 aa, Homo sapiens
  IgM  CDR3 amino acids
CARDFGSGGVLITWPS

SEQ ID NO: 750 - protein, 17 aa, Homo sapiens
  IgM  CDR3 amino acids
CARYPGIEVTGTGALTT

SEQ ID NO: 751 - protein, 19 aa, Homo sapiens
  IgM  CDR3 amino acids
CARRGDVGNYCPTTTSWTS

SEQ ID NO: 752 - protein, 16 aa, Homo sapiens
  IgM  CDR3 amino acids
CARLPGITTTTTTWTS

SEQ ID NO: 753 - protein, 18 aa, Homo sapiens
  IgM  CDR3 amino acids
CARHVKPVDGNAYYEDSV

SEQ ID NO: 754 - protein, 17 aa, Homo sapiens
  IgM  CDR3 amino acids
CARGTRGISEPTKFDYW

SEQ ID NO: 755 - protein, 13 aa, Homo sapiens
  IgM  CDR3 amino acids
CARGGPERQLDDS

SEQ ID NO: 756 - protein, 18 aa, Homo sapiens
  IgM  CDR3 amino acids
CAHRRPDSSTWYAPTLTT

SEQ ID NO: 757 - protein, 16 aa, Homo sapiens
  IgM  CDR3 amino acids
CVSRRQTTPTSTVGPS

SEQ ID NO: 758 - protein, 11 aa, Homo sapiens
  IgM  CDR3 amino acids
CVRKEVMYFDP

SEQ ID NO: 759 - protein, 13 aa, Homo sapiens
  IgM  CDR3 amino acids
CGDTLGETMPVTA

SEQ ID NO: 760 - protein, 11 aa, Homo sapiens
  IgM  CDR3 amino acids
CATRRGQFWTT

SEQ ID NO: 761 - protein, 18 aa, Homo sapiens
  IgM  CDR3 amino acids
CARVVGGGVTTTTTVWTS

SEQ ID NO: 762 - protein, 19 aa, Homo sapiens
  IgM  CDR3 amino acids
CARVLLSGSTWYAEYFQSW

SEQ ID NO: 763 - protein, 16 aa, Homo sapiens
  IgM  CDR3 amino acids
CARTLSATGDNWFGPW

SEQ ID NO: 764 - protein, 15 aa, Homo sapiens
  IgM  CDR3 amino acids
CARTGARGDNSTMTS

SEQ ID NO: 765 - protein, 20 aa, Homo sapiens
  IgM  CDR3 amino acids
CARQTPGTLQTTTTTTVWTS

SEQ ID NO: 766 - protein, 14 aa, Homo sapiens
  IgM  CDR3 amino acids
CARPRYDYGLLLIS

SEQ ID NO: 767 - protein, 17 aa, Homo sapiens
  IgM  CDR3 amino acids
CARLTRRTTVVPRTSTT

SEQ ID NO: 768 - protein, 18 aa, Homo sapiens
  IgM  CDR3 amino acids
CARHVKPVDGNAYYEDSW

SEQ ID NO: 769 - protein, 16 aa, Homo sapiens
  IgM  CDR3 amino acids
CARHRGVRGPWALFIS

SEQ ID NO: 770 - protein, 17 aa, Homo sapiens
  IgM  CDR3 amino acids
CARGSPPGAVGFIGSTP

SEQ ID NO: 771 - protein, 15 aa, Homo sapiens
  IgM  CDR3 amino acids
CARGLSSSRSLSSTP

SEQ ID NO: 772 - protein, 10 aa, Homo sapiens
  IgM  CDR3 amino acids
CARGGATPGG

SEQ ID NO: 773 - protein, 18 aa, Homo sapiens
  IgM  CDR3 amino acids
CAREVPTGPRTSTTVWTS

SEQ ID NO: 774 - protein, 15 aa, Homo sapiens
  IgM  CDR3 amino acids
CARDPRADYLAFDIW

SEQ ID NO: 775 - protein, 15 aa, Homo sapiens
  IgM  CDR3 amino acids
CANGDTARPTGTLAT

SEQ ID NO: 776 - protein, 19 aa, Homo sapiens
  IgM  CDR3 amino acids
CAKAPSDTIIVHGPQHLTT

SEQ ID NO: 777 - protein, 11 aa, Homo sapiens
  IgM  CDR3 amino acids
CAARGRTTLTT

SEQ ID NO: 778 - protein, 12 aa, Homo sapiens
  IgM  CDR3 amino acids
CVRGSGRTGEAT

SEQ ID NO: 779 - protein, 20 aa, Homo sapiens
  IgM  CDR3 amino acids
CVREARTPATTYGWYYYDYW

SEQ ID NO: 780 - protein, 22 aa, Homo sapiens
  IgM  CDR3 amino acids
CVRDNSWSSRDAERYYYNMDVW

SEQ ID NO: 781 - protein, 21 aa, Homo sapiens
  IgM  CDR3 amino acids
CVRDLAWRTQQLLSENWFDPW

SEQ ID NO: 782 - protein, 20 aa, Homo sapiens
  IgM  CDR3 amino acids
CVRDLAWRTQQLLSEIGSTV

SEQ ID NO: 783 - protein, 21 aa, Homo sapiens
  IgM  CDR3 amino acids
CVRDLAWRTEQLLSENWFDPW

SEQ ID NO: 784 - protein, 21 aa, Homo sapiens
  IgM  CDR3 amino acids
CVRDLAWRTEELLSENWFDTW

SEQ ID NO: 785 - protein, 21 aa, Homo sapiens
  IgM  CDR3 amino acids
CVRDLAWRTEELLSENWFDPW

SEQ ID NO: 786 - protein, 20 aa, Homo sapiens
  IgM  CDR3 amino acids
CVRDLAWRTEELLSEIGSTL

SEQ ID NO: 787 - protein, 14 aa, Homo sapiens
  IgM  CDR3 amino acids
CVHRPRWLNIVANV

SEQ ID NO: 788 - protein, 13 aa, Homo sapiens
  IgM  CDR3 amino acids
CTWWQQLGEFLTS

SEQ ID NO: 789 - protein, 15 aa, Homo sapiens
  IgM  CDR3 amino acids
CTSLTSMVNFMLLMS

SEQ ID NO: 790 - protein, 18 aa, Homo sapiens
  IgM  CDR3 amino acids
CTRQEESSAAGTGGTSSP

SEQ ID NO: 791 - protein, 16 aa, Homo sapiens
  IgM  CDR3 amino acids
CTRDGVRGDLNPTLNV

SEQ ID NO: 792 - protein, 12 aa, Homo sapiens
  IgM  CDR3 amino acids
CMRHQHQRPRTT

SEQ ID NO: 793 - protein, 19 aa, Homo sapiens
  IgM  CDR3 amino acids
CITDCTGGSCDFAGPGEYW

SEQ ID NO: 794 - protein, 16 aa, Homo sapiens
  IgM  CDR3 amino acids
CATYYYKLVVIDTLTT

SEQ ID NO: 795 - protein, 12 aa, Homo sapiens
  IgM  CDR3 amino acids
CATGAATVLLTT

SEQ ID NO: 796 - protein, 14 aa, Homo sapiens
  IgM  CDR3 amino acids
CASRPGHHSGPLTT

SEQ ID NO: 797 - protein, 15 aa, Homo sapiens
  IgM  CDR3 amino acids
CASRPGHHSGPFDYW

SEQ ID NO: 798 - protein, 10 aa, Homo sapiens
  IgM  CDR3 amino acids
CASPVGGGET

SEQ ID NO: 799 - protein, 14 aa, Homo sapiens
  IgM  CDR3 amino acids
CARWPPIQGELLIS

SEQ ID NO: 800 - protein, 18 aa, Homo sapiens
  IgM  CDR3 amino acids
CARVRSGLLPTTTTTWTS

SEQ ID NO: 801 - protein, 17 aa, Homo sapiens
  IgM  CDR3 amino acids
CARVQLIGDSGYRPWTT

SEQ ID NO: 802 - protein, 13 aa, Homo sapiens
  IgM  CDR3 amino acids
CARVLRGPTTLTT

SEQ ID NO: 803 - protein, 14 aa, Homo sapiens
  IgM  CDR3 amino acids
CARQWGIRGVALTT

SEQ ID NO: 804 - protein, 15 aa, Homo sapiens
  IgM  CDR3 amino acids
CARPRYDLRFCLLIS

SEQ ID NO: 805 - protein, 10 aa, Homo sapiens
  IgM  CDR3 amino acids
CARNTEATTT

SEQ ID NO: 806 - protein, 19 aa, Homo sapiens
  IgM  CDR3 amino acids
CARMPGKEIAMADLATLTT

SEQ ID NO: 807 - protein, 18 aa, Homo sapiens
  IgM  CDR3 amino acids
CARLTRRTTVGTPDIDYV

SEQ ID NO: 808 - protein, 17 aa, Homo sapiens
  IgM  CDR3 amino acids
CARHVKPVDGNAYYEDS

SEQ ID NO: 809 - protein, 7 aa, Homo sapiens
  IgM  CDR3 amino acids
CARHLVW

SEQ ID NO: 810 - protein, 16 aa, Homo sapiens
  IgM  CDR3 amino acids
CARHDPVPQFKHGWTS

SEQ ID NO: 811 - protein, 13 aa, Homo sapiens
  IgM  CDR3 amino acids
CARGGPGRQLTMT

SEQ ID NO: 812 - protein, 16 aa, Homo sapiens
  IgM  CDR3 amino acids
CARGGGKDLLASYLTT

SEQ ID NO: 813 - protein, 13 aa, Homo sapiens
  IgM  CDR3 amino acids
CARGARSGSSMTA

SEQ ID NO: 814 - protein, 14 aa, Homo sapiens
  IgM  CDR3 amino acids
CARDYGATGSLDCW

SEQ ID NO: 815 - protein, 18 aa, Homo sapiens
  IgM  CDR3 amino acids
CARDVIGAAASYVAFDIW

SEQ ID NO: 816 - protein, 20 aa, Homo sapiens
  IgM  CDR3 amino acids
CARDEWFGSPKSRTLMLLIS

SEQ ID NO: 817 - protein, 16 aa, Homo sapiens
  IgM  CDR3 amino acids
CARAQNWDLLTGTSIS

SEQ ID NO: 818 - protein, 18 aa, Homo sapiens
  IgM  CDR3 amino acids
CARAPSIPVAVSATTLTT

SEQ ID NO: 819 - protein, 14 aa, Homo sapiens
  IgM  CDR3 amino acids
CAKHDGQSNTPDCW

SEQ ID NO: 820 - protein, 17 aa, Homo sapiens
  IgM  CDR3 amino acids
CAKGWTAARGALNTSST

SEQ ID NO: 821 - protein, 16 aa, Homo sapiens
  IgM  CDR3 amino acids
CAKGPPVVTTLDTSST

SEQ ID NO: 822 - protein, 8 aa, Homo sapiens
  IgM  CDR3 amino acids
CAKDRGGS

SEQ ID NO: 823 - protein, 20 aa, Homo sapiens
  IGHD3-22  CDR3 amino acids
CARRPIPPLTMRVVVIPLTS

SEQ ID NO: 824 - protein, 17 aa, Homo sapiens
  IGHD3-22  CDR3 amino acids
CARDPPMPMIVVQTLTT

SEQ ID NO: 825 - protein, 17 aa, Homo sapiens
  IGHD3-22  CDR3 amino acids
CARDPPMPMILVQTLTT

SEQ ID NO: 826 - protein, 19 aa, Homo sapiens
  IGHD3-22  CDR3 amino acids
CAKILITMILVVSLMLLIS

SEQ ID NO: 827 - protein, 15 aa, Homo sapiens
  IGHD6-13  CDR3 amino acids
CGRSRHSSSWQILTP

SEQ ID NO: 828 - protein, 15 aa, Homo sapiens
  IGHD6-13  CDR3 amino acids
CANGGLAAAGDHLTT

SEQ ID NO: 829 - protein, 19 aa, Homo sapiens
  IGHD6-13  CDR3 amino acids
CARAPSIPVAGIGYHFDHW

SEQ ID NO: 830 - protein, 18 aa, Homo sapiens
  IGHD6-13  CDR3 amino acids
CARAPSIPVAGIATTLTT

SEQ ID NO: 831 - protein, 23 aa, Homo sapiens
  IGHD3-10  CDR3 amino acids
CAREIRGTTMVRELTTSTATWTP

SEQ ID NO: 832 - protein, 23 aa, Homo sapiens
  IGHD3-10  CDR3 amino acids
CVRTYYFGLGDIITEITSTVWTS

SEQ ID NO: 833 - protein, 15 aa, Homo sapiens
  IGHD3-10  CDR3 amino acids
CARRTYYYGSTNLTT

SEQ ID NO: 834 - protein, 20 aa, Homo sapiens
  IGHD3-10  CDR3 amino acids
CARMVTDYYGSGNRGWFDPW

SEQ ID NO: 835 - protein, 13 aa, Homo sapiens
  IGHD3-10  CDR3 amino acids
CARDYYGSGVMTL

SEQ ID NO: 836 - protein, 9 aa, Homo sapiens
  IGHD5-5  CDR3 amino acids
CMGPGDTAI

SEQ ID NO: 837 - protein, 18 aa, Homo sapiens
  IGHD5-5  CDR3 amino acids
CARRPREMESAMVLSLTT

SEQ ID NO: 838 - protein, 25 aa, Homo sapiens
  IGHD3-9  CDR3 amino acids
CAHSAPYYDILSRNRARSWKDFDNW

SEQ ID NO: 839 - protein, 24 aa, Homo sapiens
  IGHD3-9  CDR3 amino acids
CAHSAPIMIFCLVTAHEVGRILTT

SEQ ID NO: 840 - protein, 16 aa, Homo sapiens
  IGHD3-9  CDR3 amino acids
CATVALLRYFDWSSTR

SEQ ID NO: 841 - protein, 14 aa, Homo sapiens
  IGHD3-3  CDR3 amino acids
CTRRGGVVIICLTT

SEQ ID NO: 842 - protein, 18 aa, Homo sapiens
  IGHD3-3  CDR3 amino acids
CIHTGNDFWTGTNYGLTS

SEQ ID NO: 843 - protein, 23 aa, Homo sapiens
  IGHD3-3  CDR3 amino acids
CAKDRFSGRGRFEFMEWLTPLTT

SEQ ID NO: 844 - protein, 22 aa, Homo sapiens
  IGHD3-3  CDR3 amino acids
CAKDRFSEGKVQFMEWLTPLTT

SEQ ID NO: 845 - protein, 26 aa, Homo sapiens
  IGHD6-19  CDR3 amino acids
CARGRRSLPAIVYSSGPDRPNWFDPW

SEQ ID NO: 846 - protein, 20 aa, Homo sapiens
  IGHD6-19  CDR3 amino acids
CTSAAVASSSGWPLRGVWTS

SEQ ID NO: 847 - protein, 19 aa, Homo sapiens
  IGHD2-2  CDR3 amino acids
CARAPLCSSASCHLQLDYW

SEQ ID NO: 848 - protein, 14 aa, Homo sapiens
  IGHD1-26  CDR3 amino acids
CARDDSASYSRGTT

SEQ ID NO: 849 - protein, 20 aa, Homo sapiens
  IGHD2-21  CDR3 amino acids
CARSHIVVVTAIPLEMLLIS

SEQ ID NO: 850 - protein, 16 aa, Homo sapiens
  IGHD4-23  CDR3 amino acids
CARGAGYGGNSGVRTT

SEQ ID NO: 851 - protein, 26 aa, Homo sapiens
  IGHD2-15  CDR3 amino acids
CAKDLAPLKSCSRGGCYPYYYGLDIW

SEQ ID NO: 852 - protein, 12 aa, Homo sapiens
  IGHD4-17  CDR3 amino acids
CARTLYGDFVDF

SEQ ID NO: 853 - protein, 17 aa, Homo sapiens
  IGHD5-12  CDR3 amino acids
CARHVNGYDYLFPFTSW

SEQ ID NO: 854 - protein, 20 aa, Homo sapiens
  IGHD3-16  CDR3 amino acids
CAKGVLSSGGVIATLPGSTP

SEQ ID NO: 855 - protein, 17 aa, Homo sapiens
  IGHD1-1  CDR3 amino acids
CARGGSQLERRRPLVTT

SEQ ID NO: 856 - protein, 12 aa, Homo sapiens
  IGHA1  CDR3 amino acids
CARETVGGTLTT

SEQ ID NO: 857 - protein, 18 aa, Homo sapiens
  IGHA1  CDR3 amino acids
CARISSGHDPPIITGWTS

SEQ ID NO: 858 - protein, 19 aa, Homo sapiens
  IGHA1  CDR3 amino acids
CARSPIWFGSHRFTTTWRS

SEQ ID NO: 859 - protein, 15 aa, Homo sapiens
  IGHA1  CDR3 amino acids
CARDPLETGATSLII

SEQ ID NO: 860 - protein, 20 aa, Homo sapiens
  IGHA1  CDR3 amino acids
CAKLGNRPGFTEWDHWFGPW

SEQ ID NO: 861 - protein, 15 aa, Homo sapiens
  IGHA1  CDR3 amino acids
CVRDPHETGATTLIT

SEQ ID NO: 862 - protein, 17 aa, Homo sapiens
  IGHA1  CDR3 amino acids
CARIRKEVGAPPITWTS

SEQ ID NO: 863 - protein, 16 aa, Homo sapiens
  IGHA1  CDR3 amino acids
CARGSWSGAAFYSLTT

SEQ ID NO: 864 - protein, 16 aa, Homo sapiens
  IGHA1  CDR3 amino acids
CARDPNKFRTNHLSTT

SEQ ID NO: 865 - protein, 20 aa, Homo sapiens
  IGHA1  CDR3 amino acids
CATVPELTDISLPRLMALIS

SEQ ID NO: 866 - protein, 12 aa, Homo sapiens
  IGHA1  CDR3 amino acids
CARVWGKHTLTT

SEQ ID NO: 867 - protein, 16 aa, Homo sapiens
  IGHA1  CDR3 amino acids
CARDPNKFRPNHLSTT

SEQ ID NO: 868 - protein, 15 aa, Homo sapiens
  IGHA1  CDR3 amino acids
CARAGRELLRALMTT

SEQ ID NO: 869 - protein, 15 aa, Homo sapiens
  IGHA1  CDR3 amino acids
CARAGAELLRALMTT

SEQ ID NO: 870 - protein, 18 aa, Homo sapiens
  IGHA1  CDR3 amino acids
CARAEDYYDTEGYFYLTP

SEQ ID NO: 871 - protein, 20 aa, Homo sapiens
  IGHA1  CDR3 amino acids
CAHRTNYSTNRYGAFTTLTS

SEQ ID NO: 872 - protein, 15 aa, Homo sapiens
  IGHA1  CDR3 amino acids
CVRDPQETGATTLIT

SEQ ID NO: 873 - protein, 20 aa, Homo sapiens
  IGHA1  CDR3 amino acids
CATQCLGGAGLTTTTAPWTS

SEQ ID NO: 874 - protein, 15 aa, Homo sapiens
  IGHA1  CDR3 amino acids
CARRTYYSGSTNLTT

SEQ ID NO: 875 - protein, 14 aa, Homo sapiens
  IGHA1  CDR3 amino acids
CARRTTRETGSSIS

SEQ ID NO: 876 - protein, 14 aa, Homo sapiens
  IGHA1  CDR3 amino acids
CVRQYGLGSGSLTP

SEQ ID NO: 877 - protein, 15 aa, Homo sapiens
  IGHA1  CDR3 amino acids
CVKIRNLIGFTGSTP

SEQ ID NO: 878 - protein, 16 aa, Homo sapiens
  IGHA1  CDR3 amino acids
CTRDGVRGDLNPTLNV

SEQ ID NO: 879 - protein, 12 aa, Homo sapiens
  IGHA1  CDR3 amino acids
CDKAKVTADLRT

SEQ ID NO: 880 - protein, 20 aa, Homo sapiens
  IGHA1  CDR3 amino acids
CATVPELPDISLPRLMALIS

SEQ ID NO: 881 - protein, 14 aa, Homo sapiens
  IGHA1  CDR3 amino acids
CATVFGRRYRLLTT

SEQ ID NO: 882 - protein, 15 aa, Homo sapiens
  IGHA1  CDR3 amino acids
CARYRAAYPRRAWTS

SEQ ID NO: 883 - protein, 20 aa, Homo sapiens
  IGHA1  CDR3 amino acids
CARTIGFEIAMTGGLGALTP

SEQ ID NO: 884 - protein, 18 aa, Homo sapiens
  IGHA1  CDR3 amino acids
CARRDPPVRASLSTTLTS

SEQ ID NO: 885 - protein, 23 aa, Homo sapiens
  IGHA1  CDR3 amino acids
CARFQRYCRGGSCSATLDAFDKW

SEQ ID NO: 886 - protein, 20 aa, Homo sapiens
  IGHA1  CDR3 amino acids
CARDLGERRDGEPTNWFDAW

SEQ ID NO: 887 - protein, 13 aa, Homo sapiens
  IGHA1  CDR3 amino acids
CARDLAVWATLTT

SEQ ID NO: 888 - protein, 17 aa, Homo sapiens
  IGHA1  CDR3 amino acids
CAKDVEPTVTLYNHFDP

SEQ ID NO: 889 - protein, 11 aa, Homo sapiens
  IGHA1  CDR3 amino acids
CAKDFNWEGIT

SEQ ID NO: 890 - protein, 21 aa, Homo sapiens
  IGHA1  CDR3 amino acids
CAHRTNYSTNRYGGLYYFDFW

SEQ ID NO: 891 - protein, 13 aa, Homo sapiens
  IGHA1  CDR3 amino acids
CVRGVGTILWLTI

SEQ ID NO: 892 - protein, 13 aa, Homo sapiens
  IGHA1  CDR3 amino acids
CVRDAGPGGSLTS

SEQ ID NO: 893 - protein, 27 aa, Homo sapiens
  IGHA1  CDR3 amino acids
CTTGFSGSTACHWDHTACHWDDAFAMW

SEQ ID NO: 894 - protein, 15 aa, Homo sapiens
  IGHA1  CDR3 amino acids
CTHAVESLLGTTSTS

SEQ ID NO: 895 - protein, 18 aa, Homo sapiens
  IGHA1  CDR3 amino acids
CIHTGNDFGPGPTMVWTS

SEQ ID NO: 896 - protein, 16 aa, Homo sapiens
  IGHA1  CDR3 amino acids
CGVGRGDNDVDFKFKW

SEQ ID NO: 897 - protein, 10 aa, Homo sapiens
  IGHA1  CDR3 amino acids
CATRESPLTT

SEQ ID NO: 898 - protein, 15 aa, Homo sapiens
  IGHA1  CDR3 amino acids
CATAGIELWRAGSTP

SEQ ID NO: 899 - protein, 17 aa, Homo sapiens
  IGHA1  CDR3 amino acids
CARYRIAMATSPYFDYW

SEQ ID NO: 900 - protein, 22 aa, Homo sapiens
  IGHA1  CDR3 amino acids
CARTNFGSGGYILGDTTMVWTS

SEQ ID NO: 901 - protein, 13 aa, Homo sapiens
  IGHA1  CDR3 amino acids
CARSAGYLHRRTS

SEQ ID NO: 902 - protein, 16 aa, Homo sapiens
  IGHA1  CDR3 amino acids
CARRTYYSGSTNFDYW

SEQ ID NO: 903 - protein, 18 aa, Homo sapiens
  IGHA1  CDR3 amino acids
CARRDLPFGASLSTTLTS

SEQ ID NO: 904 - protein, 14 aa, Homo sapiens
  IGHA1  CDR3 amino acids
CARPGFSYGPRLTP

SEQ ID NO: 905 - protein, 16 aa, Homo sapiens
  IGHA1  CDR3 amino acids
CARKKIPTAGYSSLTT

SEQ ID NO: 906 - protein, 16 aa, Homo sapiens
  IGHA1  CDR3 amino acids
CARGSWMGRPFISLTT

SEQ ID NO: 907 - protein, 10 aa, Homo sapiens
  IGHA1  CDR3 amino acids
CARGLRWADN

SEQ ID NO: 908 - protein, 20 aa, Homo sapiens
  IGHA1  CDR3 amino acids
CARGGTSGLILDTTSTPWTS

SEQ ID NO: 909 - protein, 19 aa, Homo sapiens
  IGHA1  CDR3 amino acids
CAREMHIDSLTVGRAFDIW

SEQ ID NO: 910 - protein, 16 aa, Homo sapiens
  IGHA1  CDR3 amino acids
CARDVPDIYSSGATDC

SEQ ID NO: 911 - protein, 15 aa, Homo sapiens
  IGHA1  CDR3 amino acids
CARDPSYLPTPALKT

SEQ ID NO: 912 - protein, 17 aa, Homo sapiens
  IGHA1  CDR3 amino acids
CARDPNKFRPNHFVDYW

SEQ ID NO: 913 - protein, 15 aa, Homo sapiens
  IGHA1  CDR3 amino acids
CARDLGTTNYWLDTW

SEQ ID NO: 914 - protein, 13 aa, Homo sapiens
  IGHA1  CDR3 amino acids
CAKQRASGNSLTI

SEQ ID NO: 915 - protein, 17 aa, Homo sapiens
  IGHA1  CDR3 amino acids
CAKEPKIVGRRRTTLIT

SEQ ID NO: 916 - protein, 20 aa, Homo sapiens
  IGHA1  CDR3 amino acids
CAKDLGVCSEGAASSLVLIS

SEQ ID NO: 917 - protein, 24 aa, Homo sapiens
  IGHA1  CDR3 amino acids
CAHSAPYYDICLVTAHEVGRILTT

SEQ ID NO: 918 - protein, 13 aa, Homo sapiens
  IGHA1  CDR3 amino acids
CAGLIGRFIPLTT

SEQ ID NO: 919 - protein, 26 aa, Homo sapiens
  IGHD2-21  CDR3 amino acids
CAKDMCGLWASCGGDCYSRRTTSLTT

SEQ ID NO: 920 - protein, 26 aa, Homo sapiens
  IGHD2-21  CDR3 amino acids
CAKDMCGLWASCGGDCYSRRTASLTT

SEQ ID NO: 921 - protein, 21 aa, Homo sapiens
  IGHD2-21  CDR3 amino acids
CARGPNMAFVVVTAILMLLIS

SEQ ID NO: 922 - protein, 23 aa, Homo sapiens
  IGHD2-21  CDR3 amino acids
CARAPDCGGSTCYSHPYYGMDVW

SEQ ID NO: 923 - protein, 23 aa, Homo sapiens
  IGHD2-21  CDR3 amino acids
CARDPRIVVVAPATHTPTTVWTS

SEQ ID NO: 924 - protein, 16 aa, Homo sapiens
  IGHD3-3  CDR3 amino acids
CIYDFWSGGPHPTLTT

SEQ ID NO: 925 - protein, 17 aa, Homo sapiens
  IGHD3-3  CDR3 amino acids
CARIVNTEGFWSGFLTP

SEQ ID NO: 926 - protein, 17 aa, Homo sapiens
  IGHD3-3  CDR3 amino acids
CARIVNTEGFGVVFLTP

SEQ ID NO: 927 - protein, 22 aa, Homo sapiens
  IGHD2-15  CDR3 amino acids
CARAPDCGGGTCYSHPTTVWTS

SEQ ID NO: 928 - protein, 22 aa, Homo sapiens
  IGHD2-15  CDR3 amino acids
CARARIVVVVPATLTPTTVWTS

SEQ ID NO: 929 - protein, 23 aa, Homo sapiens
  IGHD2-15  CDR3 amino acids
CARAPDCGGGTCYSHPYYGMDVW

SEQ ID NO: 930 - protein, 16 aa, Homo sapiens
  IGHD6-13  CDR3 amino acids
CALCPTPIAAAGSVTT

SEQ ID NO: 931 - protein, 17 aa, Homo sapiens
  IGHD6-13  CDR3 amino acids
CALCPNPYSSGWFCNYW

SEQ ID NO: 932 - protein, 18 aa, Homo sapiens
  IGHD1-26  CDR3 amino acids
CARGPATAILGATPSLTP

SEQ ID NO: 933 - protein, 18 aa, Homo sapiens
  IGHD1-26  CDR3 amino acids
CVRHDYSDNDLSTNWFGP

SEQ ID NO: 934 - protein, 18 aa, Homo sapiens
  IGHD3-10  CDR3 amino acids
CATYYYGSGSAGHNFDYW

SEQ ID NO: 935 - protein, 24 aa, Homo sapiens
  IGHD3-10  CDR3 amino acids
CARGPGLSVMIRGVITTPNHILIT

SEQ ID NO: 936 - protein, 25 aa, Homo sapiens
  IGHD2-8  CDR3 amino acids
CANVGGADRNYCINGVRHNPNYLTT

SEQ ID NO: 937 - protein, 13 aa, Homo sapiens
  IGHD3-16  CDR3 amino acids
CARGFGARGVILT

SEQ ID NO: 938 - protein, 16 aa, Homo sapiens
  IGHD5-12  CDR3 amino acids
CVLSRGLVATRTLDYW

SEQ ID NO: 939 - protein, 13 aa, Homo sapiens
  IGHD4-17  CDR3 amino acids
CARTLYGDFVDSL

SEQ ID NO: 940 - protein, 20 aa, Homo sapiens
  IGHD3-22  CDR3 amino acids
CARDKQESSGSPRNYYFDYW

SEQ ID NO: 941 - protein, 18 aa, Homo sapiens
  IGHA2  CDR3 amino acids
CAKGHQVRLRGRTGTSIS

SEQ ID NO: 942 - protein, 22 aa, Homo sapiens
  IGHA2  CDR3 amino acids
CAGAPDCGVGAAPLTSTTVCTS

SEQ ID NO: 943 - protein, 18 aa, Homo sapiens
  IGHA2  CDR3 amino acids
CAGIGGATSTTTTTTWTS

SEQ ID NO: 944 - protein, 16 aa, Homo sapiens
  IGHA2  CDR3 amino acids
CARRAAPHDYGHVLIF

SEQ ID NO: 945 - protein, 15 aa, Homo sapiens
  IGHA2  CDR3 amino acids
CVRHDGSFTKTGSTP

SEQ ID NO: 946 - protein, 8 aa, Homo sapiens
  IGHA2  CDR3 amino acids
CVKIGAAH

SEQ ID NO: 947 - protein, 25 aa, Homo sapiens
  IGHA2  CDR3 amino acids
CARLRCSNDNCAGHLYYYFSGLDIW

SEQ ID NO: 948 - protein, 13 aa, Homo sapiens
  IGHA2  CDR3 amino acids
CARASLPRGLLIS

SEQ ID NO: 949 - protein, 16 aa, Homo sapiens
  IGHA2  CDR3 amino acids
CTKGGGRKTAGKFLTP

SEQ ID NO: 950 - protein, 10 aa, Homo sapiens
  IGHA2  CDR3 amino acids
CARTARTGDL

SEQ ID NO: 951 - protein, 22 aa, Homo sapiens
  IGHA2  CDR3 amino acids
CARIGHEFYSLTYSVNDVFDLW

SEQ ID NO: 952 - protein, 16 aa, Homo sapiens
  IGHA2  CDR3 amino acids
CAKGRGRRAAGKFLTT

SEQ ID NO: 953 - protein, 16 aa, Homo sapiens
  IGHA2  CDR3 amino acids
CAKGAGRRAAGKFLTT

SEQ ID NO: 954 - protein, 20 aa, Homo sapiens
  IGHA2  CDR3 amino acids
CVRFIGAYSNNWYPGYFDYW

SEQ ID NO: 955 - protein, 16 aa, Homo sapiens
  IGHA2  CDR3 amino acids
CASQSQNYYYYYMDVW

SEQ ID NO: 956 - protein, 16 aa, Homo sapiens
  IGHA2  CDR3 amino acids
CASKKEILWAGPNLTT

SEQ ID NO: 957 - protein, 17 aa, Homo sapiens
  IGHA2  CDR3 amino acids
CARVRCGLVASEGVLIS

SEQ ID NO: 958 - protein, 16 aa, Homo sapiens
  IGHA2  CDR3 amino acids
CARRAAPMTTGMFLIF

SEQ ID NO: 959 - protein, 22 aa, Homo sapiens
  IGHA2  CDR3 amino acids
CARLRGGFPPVVKRVEVFLLTS

SEQ ID NO: 960 - protein, 16 aa, Homo sapiens
  IGHA2  CDR3 amino acids
CARGRFARGGDDSLIS

SEQ ID NO: 961 - protein, 13 aa, Homo sapiens
  IGHA2  CDR3 amino acids
CAKAPGDLCRSTP

SEQ ID NO: 962 - protein, 19 aa, Homo sapiens
  IGHA2  CDR3 amino acids
CAGIRGSNIYYHYYYMDVW

SEQ ID NO: 963 - protein, 13 aa, Homo sapiens
  IGHA2  CDR3 amino acids
CADLPGIIGGEIT

SEQ ID NO: 964 - protein, 20 aa, Homo sapiens
  IGHD3-22  CDR3 amino acids
CAKITSMIVVLIPTMMLLMS

SEQ ID NO: 965 - protein, 22 aa, Homo sapiens
  IGHD3-22  CDR3 amino acids
CARGSRARFSSDTSGYQYFDYW

SEQ ID NO: 966 - protein, 19 aa, Homo sapiens
  IGHD3-22  CDR3 amino acids
CARGVYLYYDSHAYSVLTT

SEQ ID NO: 967 - protein, 14 aa, Homo sapiens
  IGHD3-22  CDR3 amino acids
CARVNYYDSVVLTT

SEQ ID NO: 968 - protein, 15 aa, Homo sapiens
  IGHD3-22  CDR3 amino acids
CARVNYYDSSRIDYW

SEQ ID NO: 969 - protein, 21 aa, Homo sapiens
  IGHD3-22  CDR3 amino acids
CARLPPFNNDDSSSYALYLTT

SEQ ID NO: 970 - protein, 23 aa, Homo sapiens
  IGHD3-22  CDR3 amino acids
CARHSNYYYDTSGYRVLDAFDIW

SEQ ID NO: 971 - protein, 20 aa, Homo sapiens
  IGHD3-22  CDR3 amino acids
CARGGMDSYGYFYVGHYDYW

SEQ ID NO: 972 - protein, 20 aa, Homo sapiens
  IGHD3-22  CDR3 amino acids
CAKITSMIVVLTPTMMLLMS

SEQ ID NO: 973 - protein, 15 aa, Homo sapiens
  IGHD3-10  CDR3 amino acids
CARLPRMVRGNWFHP

SEQ ID NO: 974 - protein, 19 aa, Homo sapiens
  IGHD3-10  CDR3 amino acids
CARGAWAVRGVISWAGSTP

SEQ ID NO: 975 - protein, 16 aa, Homo sapiens
  IGHD3-10  CDR3 amino acids
CAGSGSGSLLTTVWTP

SEQ ID NO: 976 - protein, 20 aa, Homo sapiens
  IGHD3-10  CDR3 amino acids
CVSITNSLLWFGELLIFDCW

SEQ ID NO: 977 - protein, 18 aa, Homo sapiens
  IGHD6-13  CDR3 amino acids
CTRQEESSAAGTGGTSSP

SEQ ID NO: 978 - protein, 16 aa, Homo sapiens
  IGHD6-13  CDR3 amino acids
CALCPTPIAAAGSVTT

SEQ ID NO: 979 - protein, 21 aa, Homo sapiens
  IGHD6-13  CDR3 amino acids
CATSEGDPVAAAGTKSWFDSW

SEQ ID NO: 980 - protein, 19 aa, Homo sapiens
  IGHD6-13  CDR3 amino acids
CARLALLYGSSRYGATLTT

SEQ ID NO: 981 - protein, 15 aa, Homo sapiens
  IGHD6-13  CDR3 amino acids
CARGPSSTWYSFDYW

SEQ ID NO: 982 - protein, 23 aa, Homo sapiens
  IGHD3-3  CDR3 amino acids
CAHSVGFILDFWSGYQNNWFDPW

SEQ ID NO: 983 - protein, 18 aa, Homo sapiens
  IGHD3-3  CDR3 amino acids
CAMGPTIFGVVFLGSLTS

SEQ ID NO: 984 - protein, 23 aa, Homo sapiens
  IGHD3-3  CDR3 amino acids
CAHSVGFILDFWSGYQNNWFDPG

SEQ ID NO: 985 - protein, 22 aa, Homo sapiens
  IGHD3-3  CDR3 amino acids
CAHSVGFILDFGVVIRTTGSTP

SEQ ID NO: 986 - protein, 21 aa, Homo sapiens
  IGHD3-16  CDR3 amino acids
CVRQSPLDDVWGVFAPVGSTP

SEQ ID NO: 987 - protein, 21 aa, Homo sapiens
  IGHD3-16  CDR3 amino acids
CVRQSPLDDVWGVFAPVGSTL

SEQ ID NO: 988 - protein, 17 aa, Homo sapiens
  IGHD5-5  CDR3 amino acids
CARGVDTTMVRSTTLTT

SEQ ID NO: 989 - protein, 23 aa, Homo sapiens
  IGHD5-5  CDR3 amino acids
CARQDPYCSTSNCTMGGAMTLTT

SEQ ID NO: 990 - protein, 19 aa, Homo sapiens
  IGHD5-24  CDR3 amino acids
CARTDGIRDGYNLHRVLTT

SEQ ID NO: 991 - protein, 20 aa, Homo sapiens
  IGHD5-24  CDR3 amino acids
CARTDAIRDGYNLHRVFDYW

SEQ ID NO: 992 - protein, 20 aa, Homo sapiens
  IGHD3-9  CDR3 amino acids
CAREGRNYDSLTGDPWFDPW

SEQ ID NO: 993 - protein, 23 aa, Homo sapiens
  IGHD1-7  CDR3 amino acids
CARGDCTTINCNTHSDYYGLDVW

SEQ ID NO: 994 - protein, 16 aa, Homo sapiens
  IGHD1-7  CDR3 amino acids
CARTVGTGTTNGYLTS

SEQ ID NO: 995 - protein, 22 aa, Homo sapiens
  IGHD1-7  CDR3 amino acids
CAREIVLLSTATLTPTTTVWTS

SEQ ID NO: 996 - protein, 15 aa, Homo sapiens
  IGHD4-17  CDR3 amino acids
CARHPKPPTVTSATT

SEQ ID NO: 997 - protein, 20 aa, Homo sapiens
  IGHD5-12  CDR3 amino acids
CARQDSGYDYGYYHNGMDVW

SEQ ID NO: 998 - protein, 20 aa, Homo sapiens
  IGHD2-2  CDR3 amino acids
CARHSLAYCSTTSCAVFDYW

SEQ ID NO: 999 - protein, 27 aa, Homo sapiens
  IGHD2-2  CDR3 amino acids
CARHGFEGREVVPPAMNEYYYYYMDVW

SEQ ID NO: 1000 - protein, 18 aa, Homo sapiens
  IGHD2-15  CDR3 amino acids
CALTGLNGRSCYSELLIS

SEQ ID NO: 1001 - protein, 16 aa, Homo sapiens
  IGHD4-23  CDR3 amino acids
CARGAGYGGNSGVRTT

SEQ ID NO: 1002 - protein, 15 aa, Homo sapiens
  IGHG1  CDR3 amino acids
CARGATVGVETGSTP

SEQ ID NO: 1003 - protein, 13 aa, Homo sapiens
  IGHG1  CDR3 amino acids
CARKGSRHGGSTP

SEQ ID NO: 1004 - protein, 15 aa, Homo sapiens
  IGHG1  CDR3 amino acids
CARQNGPSIGGGSTP

SEQ ID NO: 1005 - protein, 15 aa, Homo sapiens
  IGHG1  CDR3 amino acids
CARGATPGAETGSTP

SEQ ID NO: 1006 - protein, 14 aa, Homo sapiens
  IGHG1  CDR3 amino acids
CAKDTLGGMGGLTS

SEQ ID NO: 1007 - protein, 27 aa, Homo sapiens
  IGHG1  CDR3 amino acids
CARVRVLPEGVLISLRPLGSTTITWTS

SEQ ID NO: 1008 - protein, 15 aa, Homo sapiens
  IGHG1  CDR3 amino acids
CATDRDSSWGTSLTT

SEQ ID NO: 1009 - protein, 16 aa, Homo sapiens
  IGHG1  CDR3 amino acids
CARRGGSTVTTGTSIS

SEQ ID NO: 1010 - protein, 23 aa, Homo sapiens
  IGHG1  CDR3 amino acids
CARQDPYCSTSNCTMGGAMTLTT

SEQ ID NO: 1011 - protein, 15 aa, Homo sapiens
  IGHG1  CDR3 amino acids
CAILPETQWYPRLTT

SEQ ID NO: 1012 - protein, 13 aa, Homo sapiens
  IGHG1  CDR3 amino acids
CVHRPRWLNVVPT

SEQ ID NO: 1013 - protein, 13 aa, Homo sapiens
  IGHG1  CDR3 amino acids
CVHRPRWLNVVPN

SEQ ID NO: 1014 - protein, 15 aa, Homo sapiens
  IGHG1  CDR3 amino acids
CARLGKNHSQGVDYW

SEQ ID NO: 1015 - protein, 24 aa, Homo sapiens
  IGHG1  CDR3 amino acids
CARGFMVQASSVRLKRGQFLADSW

SEQ ID NO: 1016 - protein, 14 aa, Homo sapiens
  IGHG1  CDR3 amino acids
CARGDWGTVTLATT

SEQ ID NO: 1017 - protein, 21 aa, Homo sapiens
  IGHG1  CDR3 amino acids
CARDNQPWRDARNLGGAFDVW

SEQ ID NO: 1018 - protein, 22 aa, Homo sapiens
  IGHG1  CDR3 amino acids
CARDGLRPPPFMVTIQRGGLTT

SEQ ID NO: 1019 - protein, 23 aa, Homo sapiens
  IGHG1  CDR3 amino acids
CARAVGGFNSGWPSIGVPARSTP

SEQ ID NO: 1020 - protein, 23 aa, Homo sapiens
  IGHG1  CDR3 amino acids
CARAVGGFNSGWPSIGVPARSTL

SEQ ID NO: 1021 - protein, 23 aa, Homo sapiens
  IGHG1  CDR3 amino acids
CAKSPKPWSQLVSTPIMPTPWTS

SEQ ID NO: 1022 - protein, 13 aa, Homo sapiens
  IGHG1  CDR3 amino acids
CVRESTFYYFGPW

SEQ ID NO: 1023 - protein, 26 aa, Homo sapiens
  IGHG1  CDR3 amino acids
CVRDDDYSRTWYMGQGASSDYGMDVW

SEQ ID NO: 1024 - protein, 14 aa, Homo sapiens
  IGHG1  CDR3 amino acids
CVKWVSGVLTSLTT

SEQ ID NO: 1025 - protein, 18 aa, Homo sapiens
  IGHG1  CDR3 amino acids
CATSGRSSAWYPDVFDIW

SEQ ID NO: 1026 - protein, 18 aa, Homo sapiens
  IGHG1  CDR3 amino acids
CATNYCRGISCYPAPLTT

SEQ ID NO: 1027 - protein, 13 aa, Homo sapiens
  IGHG1  CDR3 amino acids
CASMIALHHTLTS

SEQ ID NO: 1028 - protein, 15 aa, Homo sapiens
  IGHG1  CDR3 amino acids
CARYSPVDPSTLDFW

SEQ ID NO: 1029 - protein, 16 aa, Homo sapiens
  IGHG1  CDR3 amino acids
CARVLDSSAHWYFDDW

SEQ ID NO: 1030 - protein, 15 aa, Homo sapiens
  IGHG1  CDR3 amino acids
CARQNGPSIGGGSTL

SEQ ID NO: 1031 - protein, 18 aa, Homo sapiens
  IGHG1  CDR3 amino acids
CARQHSEWEILRLVFDHW

SEQ ID NO: 1032 - protein, 15 aa, Homo sapiens
  IGHG1  CDR3 amino acids
CARLPRMVRVTGSTP

SEQ ID NO: 1033 - protein, 15 aa, Homo sapiens
  IGHG1  CDR3 amino acids
CARIDYVSTWYYDQW

SEQ ID NO: 1034 - protein, 16 aa, Homo sapiens
  IGHG1  CDR3 amino acids
CARICAEREFLSLLTP

SEQ ID NO: 1035 - protein, 22 aa, Homo sapiens
  IGHG1  CDR3 amino acids
CARGDCTTINCNTHSTTTVWTS

SEQ ID NO: 1036 - protein, 15 aa, Homo sapiens
  IGHG1  CDR3 amino acids
CARGATVGVETGSTL

SEQ ID NO: 1037 - protein, 15 aa, Homo sapiens
  IGHG1  CDR3 amino acids
CARGATLGVETGWTP

SEQ ID NO: 1038 - protein, 17 aa, Homo sapiens
  IGHG1  CDR3 amino acids
CAREYYGILYGYYFDYW

SEQ ID NO: 1039 - protein, 20 aa, Homo sapiens
  IGHG1  CDR3 amino acids
CARDNQPWRDARNLGVHLMC

SEQ ID NO: 1040 - protein, 15 aa, Homo sapiens
  IGHG1  CDR3 amino acids
CARDGGLAGTGTLEY

SEQ ID NO: 1041 - protein, 16 aa, Homo sapiens
  IGHG1  CDR3 amino acids
CARAGLVLGPYGMDIW

SEQ ID NO: 1042 - protein, 24 aa, Homo sapiens
  IGHG1  CDR3 amino acids
CAKVAETLVSTGFDSYYAYSMDVW

SEQ ID NO: 1043 - protein, 18 aa, Homo sapiens
  IGHG1  CDR3 amino acids
CAKTYDYGSRGFSILLIS

SEQ ID NO: 1044 - protein, 16 aa, Homo sapiens
  IGHG1  CDR3 amino acids
CAKGAGRRAAGKFLTT

SEQ ID NO: 1045 - protein, 27 aa, Homo sapiens
  IGHG1  CDR3 amino acids
CAKAKRRSLGMQTLPTLRGRSDGFDVW

SEQ ID NO: 1046 - protein, 16 aa, Homo sapiens
  IGHG1  CDR3 amino acids
CAKADCGTGCFIVDDW

SEQ ID NO: 1047 - protein, 17 aa, Homo sapiens
  IGHD3-10  CDR3 amino acids
CARGRYAGGVIITALTP

SEQ ID NO: 1048 - protein, 21 aa, Homo sapiens
  IGHD3-10  CDR3 amino acids
CSREVGRDYYGSGVIEITWTS

SEQ ID NO: 1049 - protein, 22 aa, Homo sapiens
  IGHD3-10  CDR3 amino acids
CSREVGRDYYGSGSYRNYMDVW

SEQ ID NO: 1050 - protein, 20 aa, Homo sapiens
  IGHD2-15  CDR3 amino acids
CAKKEFILVVVITMMSLLMS

SEQ ID NO: 1051 - protein, 14 aa, Homo sapiens
  IGHD2-15  CDR3 amino acids
CAKDMTAKACSDYW

SEQ ID NO: 1052 - protein, 20 aa, Homo sapiens
  IGHD2-15  CDR3 amino acids
CARVMGCRGGRCDFRAFDIW

SEQ ID NO: 1053 - protein, 16 aa, Homo sapiens
  IGHD2-15  CDR3 amino acids
CARRFCSGGICYFLTT

SEQ ID NO: 1054 - protein, 21 aa, Homo sapiens
  IGHD2-15  CDR3 amino acids
CAKEGVYFSGGNHYDVAFNVW

SEQ ID NO: 1055 - protein, 15 aa, Homo sapiens
  IGHD6-25  CDR3 amino acids
CARVKGGIAGMAWTS

SEQ ID NO: 1056 - protein, 14 aa, Homo sapiens
  IGHD6-19  CDR3 amino acids
CARDLGSGWFRFDP

SEQ ID NO: 1057 - protein, 14 aa, Homo sapiens
  IGHD6-19  CDR3 amino acids
CARDLGSGWFGSTP

SEQ ID NO: 1058 - protein, 17 aa, Homo sapiens
  IGHD3-3  CDR3 amino acids
CARPSRCCYSGGGRLTL

SEQ ID NO: 1059 - protein, 17 aa, Homo sapiens
  IGHD3-3  CDR3 amino acids
CARPSRCCYVRGGRLTL

SEQ ID NO: 1060 - protein, 18 aa, Homo sapiens
  IGHD5-24  CDR3 amino acids
CARGKRDAYNYYSHLDSW

SEQ ID NO: 1061 - protein, 17 aa, Homo sapiens
  IGHD5-24  CDR3 amino acids
CARGKEMPTITTLILTP

SEQ ID NO: 1062 - protein, 15 aa, Homo sapiens
  IGHD4-17  CDR3 amino acids
CAKGENTVTTGQEYW

SEQ ID NO: 1063 - protein, 14 aa, Homo sapiens
  IGHD4-17  CDR3 amino acids
CAKGENTVTTGQEY

SEQ ID NO: 1064 - protein, 7 aa, Homo sapiens
  IGHD3-22  CDR3 amino acids
CARDPDF

SEQ ID NO: 1065 - protein, 23 aa, Homo sapiens
  IGHD2-8  CDR3 amino acids
CAKSHHCTNGVCHPPRFGQRSTP

SEQ ID NO: 1066 - protein, 23 aa, Homo sapiens
  IGHD2-2  CDR3 amino acids
CASRYCTSDRCLGASGKPSFDTW

SEQ ID NO: 1067 - protein, 17 aa, Homo sapiens
  IGHG2  CDR3 amino acids
CARGGPKKVVTAAHLSP

SEQ ID NO: 1068 - protein, 14 aa, Homo sapiens
  IGHG2  CDR3 amino acids
CSTLGLGPPGGQTT

SEQ ID NO: 1069 - protein, 17 aa, Homo sapiens
  IGHG2  CDR3 amino acids
CARDHYDTRGVRMLLIS

SEQ ID NO: 1070 - protein, 23 aa, Homo sapiens
  IGHG2  CDR3 amino acids
CARMVRGGGRTSSGYYYYYMDVW

SEQ ID NO: 1071 - protein, 15 aa, Homo sapiens
  IGHG2  CDR3 amino acids
CARDGVWDLPTTLTT

SEQ ID NO: 1072 - protein, 23 aa, Homo sapiens
  IGHG2  CDR3 amino acids
CTMATVGHGLRRCFGKSTATLTS

SEQ ID NO: 1073 - protein, 19 aa, Homo sapiens
  IGHG2  CDR3 amino acids
CVRMGPPCQLAGRSSSLTS

SEQ ID NO: 1074 - protein, 14 aa, Homo sapiens
  IGHG2  CDR3 amino acids
CSTLGLGPPGGLTT

SEQ ID NO: 1075 - protein, 9 aa, Homo sapiens
  IGHG2  CDR3 amino acids
CMGPGETAI

SEQ ID NO: 1076 - protein, 17 aa, Homo sapiens
  IGHG2  CDR3 amino acids
CARVSMIRFRVWGLWTS

SEQ ID NO: 1077 - protein, 14 aa, Homo sapiens
  IGHG2  CDR3 amino acids
CARVQRGAVVIPTT

SEQ ID NO: 1078 - protein, 18 aa, Homo sapiens
  IGHG2  CDR3 amino acids
CARRRYNDLGAPNWVDPW

SEQ ID NO: 1079 - protein, 22 aa, Homo sapiens
  IGHG2  CDR3 amino acids
CARGEDCGGGRCNNLPTTVWTS

SEQ ID NO: 1080 - protein, 17 aa, Homo sapiens
  IGHG2  CDR3 amino acids
CAKRKLAPPRKFTTLTT

SEQ ID NO: 1081 - protein, 22 aa, Homo sapiens
  IGHG2  CDR3 amino acids
CATLEGGAPPDLRRAEAFLLIS

SEQ ID NO: 1082 - protein, 23 aa, Homo sapiens
  IGHG2  CDR3 amino acids
CARGKDCGGGRCNNVPYYGMDVW

SEQ ID NO: 1083 - protein, 16 aa, Homo sapiens
  IGHG2  CDR3 amino acids
CAKDGHKLTGTTTRTS

SEQ ID NO: 1084 - protein, 15 aa, Homo sapiens
  IGHG2  CDR3 amino acids
CVRDLGAITPVFSTS

SEQ ID NO: 1085 - protein, 20 aa, Homo sapiens
  IGHG2  CDR3 amino acids
CARSFVVKVHAHCGAVLSST

SEQ ID NO: 1086 - protein, 21 aa, Homo sapiens
  IGHG2  CDR3 amino acids
CARRLNVAVVVPAYVGWFDPW

SEQ ID NO: 1087 - protein, 22 aa, Homo sapiens
  IGHG2  CDR3 amino acids
CARGKDCGGGRCNNVPTTGWTS

SEQ ID NO: 1088 - protein, 16 aa, Homo sapiens
  IGHG2  CDR3 amino acids
CARDWEWQQRLNYFDP

SEQ ID NO: 1089 - protein, 14 aa, Homo sapiens
  IGHG2  CDR3 amino acids
CVRRAAGGRSGLTT

SEQ ID NO: 1090 - protein, 16 aa, Homo sapiens
  IGHG2  CDR3 amino acids
CVRPPPTVPGTAGSTP

SEQ ID NO: 1091 - protein, 12 aa, Homo sapiens
  IGHG2  CDR3 amino acids
CVALFVPAGSTL

SEQ ID NO: 1092 - protein, 24 aa, Homo sapiens
  IGHG2  CDR3 amino acids
CTMATVGHGATTLFREVHRNTDFW

SEQ ID NO: 1093 - protein, 14 aa, Homo sapiens
  IGHG2  CDR3 amino acids
CSTLGLGPRGADYW

SEQ ID NO: 1094 - protein, 11 aa, Homo sapiens
  IGHG2  CDR3 amino acids
CSRTGGRLLIS

SEQ ID NO: 1095 - protein, 12 aa, Homo sapiens
  IGHG2  CDR3 amino acids
CSKVGRILKLIT

SEQ ID NO: 1096 - protein, 11 aa, Homo sapiens
  IGHG2  CDR3 amino acids
CKVAVEMVLMY

SEQ ID NO: 1097 - protein, 12 aa, Homo sapiens
  IGHG2  CDR3 amino acids
CGKFLGTTVASS

SEQ ID NO: 1098 - protein, 22 aa, Homo sapiens
  IGHG2  CDR3 amino acids
CATLTGGAPPDLRRAEAFLLIS

SEQ ID NO: 1099 - protein, 14 aa, Homo sapiens
  IGHG2  CDR3 amino acids
CATEGTGAVTPFTT

SEQ ID NO: 1100 - protein, 11 aa, Homo sapiens
  IGHG2  CDR3 amino acids
CATAPGGTSYT

SEQ ID NO: 1101 - protein, 14 aa, Homo sapiens
  IGHG2  CDR3 amino acids
CASRPSWGSSFDFW

SEQ ID NO: 1102 - protein, 13 aa, Homo sapiens
  IGHG2  CDR3 amino acids
CASRPPGAAALTS

SEQ ID NO: 1103 - protein, 17 aa, Homo sapiens
  IGHG2  CDR3 amino acids
CARRRYNDLGAPTGSTP

SEQ ID NO: 1104 - protein, 22 aa, Homo sapiens
  IGHG2  CDR3 amino acids
CARMVREEAERRPAIIITTWTS

SEQ ID NO: 1105 - protein, 17 aa, Homo sapiens
  IGHG2  CDR3 amino acids
CARGPGWGMGSTKFDCW

SEQ ID NO: 1106 - protein, 16 aa, Homo sapiens
  IGHG2  CDR3 amino acids
CARGPGGVWDRLSLTS

SEQ ID NO: 1107 - protein, 20 aa, Homo sapiens
  IGHG2  CDR3 amino acids
CARGGKSATGANYHQFFDCW

SEQ ID NO: 1108 - protein, 17 aa, Homo sapiens
  IGHG2  CDR3 amino acids
CARDWEWQQRLNYFDPW

SEQ ID NO: 1109 - protein, 16 aa, Homo sapiens
  IGHG2  CDR3 amino acids
CARDHYYDERNQGPDW

SEQ ID NO: 1110 - protein, 12 aa, Homo sapiens
  IGHG2  CDR3 amino acids
CARAGGHGTWTS

SEQ ID NO: 1111 - protein, 15 aa, Homo sapiens
  IGHG2  CDR3 amino acids
CAKSLRVGGDVFEIW

SEQ ID NO: 1112 - protein, 9 aa, Homo sapiens
  IGHG2  CDR3 amino acids
CAKSDYFDP

SEQ ID NO: 1113 - protein, 17 aa, Homo sapiens
  IGHG2  CDR3 amino acids
CAKGRGRLVTIATTLTT

SEQ ID NO: 1114 - protein, 17 aa, Homo sapiens
  IGHG2  CDR3 amino acids
CAKAHFPGDLPSFSSIS

SEQ ID NO: 1115 - protein, 16 aa, Homo sapiens
  IGHG2  CDR3 amino acids
CAHQQWRPGRRGFDYW

SEQ ID NO: 1116 - DNA, 35 bp, artificial sequence; identical to SEQ ID NO: 1
  BSL-18E  primer
  misc_feature (35)..(35): n is a, c, g, t or u

SEQ ID NO: 1117 - DNA, 20 bp, artificial sequence
  P20EA  primer
taatacgactccgaattccc

SEQ ID NO: 1118 - DNA, 10 bp, artificial sequence
  P10EA  primer
gggaattcgg

SEQ ID NO: 1119 - DNA, 23 bp, artificial sequence
  CA1 primer
tgttgaaggcgtttgcacatgca

SEQ ID NO: 1120 - DNA, 23 bp, artificial sequence
  CA2  primer
gtgcatagacctcatgtctagca

SEQ ID NO: 1121 - DNA, 18 bp, artificial sequence
  TRAC-3ter-1st  primer
cagcgtcatgagcagatt

SEQ ID NO: 1122 - DNA, 18 bp, artificial sequence
  TRAC-3ter-2nd  primer
actttcaggaggaggatt

SEQ ID NO: 1123 - DNA, 23 bp, artificial sequence
  CB1  primer
gaactggacttgacagcggaact

SEQ ID NO: 1124 - DNA, 23 bp, artificial sequence
  CB2  primer
aggcagtatctggagtcattgag

SEQ ID NO: 1125 - DNA, 18 bp, artificial sequence
  TRBC-Center-1st  primer
acagtctgctctacccca

SEQ ID NO: 1126 - DNA, 18 bp, artificial sequence
  TRBC-Center-2nd  primer
gtccactcgtcattctcc

SEQ ID NO: 1127 - DNA, 18 bp, artificial sequence
  TRBC-3ter-1st  primer
gaatcctttctcttgacc

SEQ ID NO: 1128 - DNA, 20 bp, artificial sequence
  TRBC-3ter-2nd  primer
ttccctagcaagatctcata

SEQ ID NO: 1129 - DNA, 19 bp, artificial sequence
  CM1  primer
tcctgtgcgaggcagccaa

SEQ ID NO: 1130 - DNA, 20 bp, artificial sequence
  CM2  primer
gtatccgacggggaattctc

SEQ ID NO: 1131 - DNA, 20 bp, artificial sequence
  IGHM-Cent-1st  primer
gatgttggtgtgggttttca

SEQ ID NO: 1132 - DNA, 20 bp, artificial sequence
  IGHM-Cent-2nd  primer
ataggtggtcaggtctgtga

SEQ ID NO: 1133 - DNA, 20 bp, artificial sequence
  IGHM-3ter-1st  primer
tagaagaggctcaggaggaa

SEQ ID NO: 1134 - DNA, 20 bp, artificial sequence
  IGHM-3ter-2nd  primer
ttccattcctcttcggacac

SEQ ID NO: 1135 - DNA, 20 bp, artificial sequence
  CA1  primer
gctggctgctcgtggtgtac

SEQ ID NO: 1136 - DNA, 21 bp, artificial sequence
  CA2  primer
gggaagtttctggcggtcacg

SEQ ID NO: 1137 - DNA, 20 bp, artificial sequence
  IGHA-Cent-1st  primer
gaatgtgtttccggattttg

SEQ ID NO: 1138 - DNA, 18 bp, artificial sequence
  IGHA-Cent-2nd  primer
tagcagccacagaggtca

SEQ ID NO: 1139 - DNA, 20 bp, artificial sequence
  IGHA-3ter-1st  primer
gccatgacaacagacacatt

SEQ ID NO: 1140 - DNA, 19 bp, artificial sequence
  IGHA-3ter-2nd  primer
ggtcgatggtcttctgtgt

SEQ ID NO: 1141 - DNA, 21 bp, artificial sequence
  CG1  primer
caccttggtgttgctgggctt

SEQ ID NO: 1142 - DNA, 21 bp, artificial sequence
  CG2  primer
tcctgaggactgtaggacagc

SEQ ID NO: 1143 - DNA, 19 bp, artificial sequence
  IGHG-Cent-1st  primer
gaccttgcacttgtactcc

SEQ ID NO: 1144 - DNA, 20 bp, artificial sequence
  IGHG-Cent-2nd  primer
ggctttgtcttggcattatg

SEQ ID NO: 1145 - DNA, 20 bp, artificial sequence
  IGHG-3ter-1st  primer
ctgtagaggaagaaggagcc

SEQ ID NO: 1146 - DNA, 19 bp, artificial sequence
  IGHG-3ter-2nd  primer
ttgtagttgttctccggct

SEQ ID NO: 1147 - DNA, 20 bp, artificial sequence
  CD1  primer
gtcccgtctttgtatctcag

SEQ ID NO: 1148 - DNA, 18 bp, artificial sequence
  CD2  primer
tctgtgtccccatgtacc

SEQ ID NO: 1149 - DNA, 20 bp, artificial sequence
  IGHD-Cent-1st  primer
tctttgtctctctctcttct

SEQ ID NO: 1150 - DNA, 20 bp, artificial sequence
  IGHD-Cent-2nd  primer
cctctttctccttctccttc

SEQ ID NO: 1151 - DNA, 20 bp, artificial sequence
  IGHD-3ter-1st  primer
tagaggagggtgaggatgaa

SEQ ID NO: 1152 - DNA, 20 bp, artificial sequence
  IGHD-3ter-2nd  primer
tcatcaaaggtcgtgtagtc

SEQ ID NO: 1153 - DNA, 18 bp, artificial sequence
  CE1  primer
catagtgaccagagagcg

SEQ ID NO: 1154 - DNA, 19 bp, artificial sequence
  CE2  primer
gtggctggtaaggtcatag

SEQ ID NO: 1155 - DNA, 19 bp, artificial sequence
  IGHE-Cent-1st  primer
tgcttctcctcctttctgg

SEQ ID NO: 1156 - DNA, 20 bp, artificial sequence
  IGHE-Cent-2nd  primer
gaatctgcacacttcttggt

SEQ ID NO: 1157 - DNA, 20 bp, artificial sequence
  IGHE-3ter-1st  primer
tcatctttctgctcccattc

SEQ ID NO: 1158 - DNA, 18 bp, artificial sequence
  IGHE-3ter-2nd  primer
ctgaagacgaagaagccg

SEQ ID NO: 1159 - DNA, 19 bp, artificial sequence
  CK1  primer
ttgtgtttctcgtagtctg

SEQ ID NO: 1160 - DNA, 18 bp, artificial sequence
  CK2  primer
ctgtactttggcctctct

SEQ ID NO: 1161 - DNA, 19 bp, artificial sequence
  CL1  primer
tgtcttctccacggtgctc

SEQ ID NO: 1162 - DNA, 16 bp, artificial sequence
  CL2  primer
ccgggtagaagtcact

SEQ ID NO: 1163 - protein, 17 aa, Homo sapiens
  TRBV20-1(BV) and TRBJ2-1(BJ)  CDR3 amino acids
CSARESTSDPKNEQFFG

SEQ ID NO: 1164 - protein, 16 aa, Homo sapiens
  TRBV10-3(BV) and TRBJ2-5(BJ)  CDR3 amino acids
CAISEPTGIRRDPVLR

SEQ ID NO: 1165 - protein, 16 aa, Homo sapiens
  TRBV10-3(TRBV) and TRBJ2-5(TRBJ)  CDR3 amino acids
CAISEPTGIRRDPVLR

SEQ ID NO: 1166 - protein, 17 aa, Homo sapiens
  TRBV20-1(TRBV) and TRBJ2-1(TRBJ)  CDR3 amino acids
CSARESTSDPKNEQFFG

SEQ ID NO: 1167 - protein, 17 aa, Homo sapiens
  TRBV20-1(TRBV)  and TRBJ2-1(TRBJ)  CDR3 amino acids
CSARESTSDTKNEQFFG

SEQ ID NO: 1168 - protein, 17 aa, Homo sapiens
  TRBV20/OR9-2(TRBV) and TRBJ2-1(TRBJ)  CDR3 amino acids
CSARESTSDTKNEQFFG

SEQ ID NO: 1169 - protein, 16 aa, Homo sapiens
  TRBV20-1(TRBV) and TRBJ2-1(TRBJ)  CDR3 amino acids
CSARESTSDTKMSSSS

SEQ ID NO: 1170 - protein, 16 aa, Homo sapiens
  TRBV4-2(TRBV) and TRBJ2-1(TRBJ)  CDR3 amino acids
CASSQTSGYGNEQFFG

SEQ ID NO: 1171 - protein, 16 aa, Homo sapiens
  TRBV10-3(TRBV) and TRBJ2-5(TRBJ)  CDR3 amino acids
CAISEPTGIRRDPVLG

SEQ ID NO: 1172 - protein, 15 aa, Homo sapiens
  TRBV10-3(TRBV) and TRBJ2-7(TRBJ)  CDR3 amino acids
CAIRGGSDSYEQYFG

SEQ ID NO: 1173 - protein, 15 aa, Homo sapiens
  TRBV19(TRBV) and TRBJ1-5(TRBJ)  CDR3 amino acids
CASSRGQGDQPQHFG

SEQ ID NO: 1174 - protein, 16 aa, Homo sapiens
  TRBV9(TRBV) and TRBJ2-1(TRBJ)  CDR3 amino acids
CASSEEQGWYNEQFFG

SEQ ID NO: 1175 - protein, 13 aa, Homo sapiens
  TRBV20/OR9-2(TRBV) and TRBJ1-2(TRBJ)  CDR3 amino acids
CSARKDSGGYTFG

SEQ ID NO: 1176 - protein, 16 aa, Homo sapiens
  TRBV10-3(TRBV) and TRBJ2-5(TRBJ)  CDR3 amino acids
CAISERQGSEETQYFG

SEQ ID NO: 1177 - protein, 15 aa, Homo sapiens
  TRBV12-4(TRBV) and TRBJ1-5(TRBJ)  CDR3 amino acids
CASSLTGENQPQHFG

SEQ ID NO: 1178 - protein, 17 aa, Homo sapiens
  TRBV12-4(TRBV) and TRBJ2-5(TRBJ)  CDR3 amino acids
CASSFDRLAGGETQYFG

SEQ ID NO: 1179 - protein, 16 aa, Homo sapiens
  TRBV20/OR9-2(TRBV) and TRBJ2-1(TRBJ)  CDR3 amino acids
CSARESTSDTKMSSSS

SEQ ID NO: 1180 - protein, 14 aa, Homo sapiens
  TRBV3-1(TRBV) and TRBJ2-3(TRBJ)  CDR3 amino acids
CASSRIGGDTQYFG

SEQ ID NO: 1181 - protein, 15 aa, Homo sapiens
  TRBV5-6(TRBV) and TRBJ1-1(TRBJ)  CDR3 amino acids
CASSLRDRDTEAFFG

SEQ ID NO: 1182 - protein, 17 aa, Homo sapiens
  TRBV6-1(TRBV) and TRBJ2-5(TRBJ)  CDR3 amino acids
CASSEDWGPYQETQYFG

SEQ ID NO: 1183 - protein, 16 aa, Homo sapiens
  TRBV10-3(TRBV) and TRBJ2-5(TRBJ)  CDR3 amino acids
CAISEPTGDQKRPSTS

SEQ ID NO: 1184 - protein, 16 aa, Homo sapiens
  TRBV10-3(TRBV) and TRBJ2-5(TRBJ)  CDR3 amino acids
CAISEPTGIRRDPSTS

SEQ ID NO: 1185 - protein, 16 aa, Homo sapiens
  TRBV10-3(TRBV) and TRBJ2-5(TRBJ)  CDR3 amino acids
CAISEPTGIRRDPVRS

SEQ ID NO: 1186 - protein, 16 aa, Homo sapiens
  TRBV18(TRBV) and TRBJ1-4(TRBJ)  CDR3 amino acids
CASSPGQGEDEKLFFG

SEQ ID NO: 1187 - protein, 16 aa, Homo sapiens
  TRBV20-1(TRBV) and TRBJ2-1(TRBJ)  CDR3 amino acids
CSARESTSDPKMSSLR

SEQ ID NO: 1188 - protein, 16 aa, Homo sapiens
  TRBV20-1(TRBV) and TRBJ2-1(TRBJ)  CDR3 amino acids
CSARGSTSDPKMSSSS

SEQ ID NO: 1189 - protein, 16 aa, Homo sapiens
  TRBV20-1(TRBV) and TRBJ2-5(TRBJ)  CDR3 amino acids
CSARESTSDPKMSSSS

SEQ ID NO: 1190 - protein, 17 aa, Homo sapiens
  TRBV20/OR9-2(TRBV) and TRBJ2-1(TRBJ)  CDR3 amino acids
  misc_feature (14)..(14): Xaa can be any naturally occurring amino acid
CSARESTSDTKNEXFFG

SEQ ID NO: 1191 - protein, 14 aa, Homo sapiens
  TRBV25-1(TRBV) and TRBJ1-1(TRBJ)  CDR3 amino acids
CASTDTLNTEAFFG

SEQ ID NO: 1192 - protein, 19 aa, Homo sapiens
  TRBV28(TRBV) and TRBJ2-3(TRBJ)  CDR3 amino acids
CASSSPGQGGSGRDTQYFG

SEQ ID NO: 1193 - protein, 13 aa, Homo sapiens
  TRBV7-9(TRBV) and TRBJ2-1(TRBJ)  CDR3 amino acids
CASSLTGNEQFFG

SEQ ID NO: 1194 - protein, 15 aa, Homo sapiens
  TRBV10-2(TRBV) and TRBJ1-5(TRBJ)  CDR3 amino acids
CASSDRDSNQPQHFG

SEQ ID NO: 1195 - protein, 15 aa, Homo sapiens
  TRBV10-3(TRBV) and TRBJ2-1(TRBJ)  CDR3 amino acids
CAIRGGSDSYEQFFG

SEQ ID NO: 1196 - protein, 15 aa, Homo sapiens
  TRBV15(TRBV) and TRBJ1-5(TRBJ)  CDR3 amino acids
CATSTPDRPPAPSIL

SEQ ID NO: 1197 - protein, 18 aa, Homo sapiens
  TRBV15(TRBV) and TRBJ2-3(TRBJ)  CDR3 amino acids
CATSRDTLAEGPKIRSIL

SEQ ID NO: 1198 - protein, 13 aa, Homo sapiens
  TRBV18(TRBV) and TRBJ1-1(TRBJ)  CDR3 amino acids
CASSPQGEEAFLD

SEQ ID NO: 1199 - protein, 16 aa, Homo sapiens
  TRBV18(TRBV) and TRBJ2-7(TRBJ)  CDR3 amino acids
CASSPDAGGILRAVLR

SEQ ID NO: 1200 - protein, 15 aa, Homo sapiens
  TRBV28(TRBV) and TRBJ1-2(TRBJ)  CDR3 amino acids
CASSLLRDRDGYTFG

SEQ ID NO: 1201 - protein, 15 aa, Homo sapiens
  TRBV28(TRBV) and TRBJ1-2(TRBJ)  CDR3 amino acids
CASSLMVPVYGYTFG

SEQ ID NO: 1202 - protein, 15 aa, Homo sapiens
  TRBV9(TRBV) and TRBJ2-7(TRBJ)  CDR3 amino acids
CASSAAGGPYEQYFG

SEQ ID NO: 1203 - protein, 16 aa, Homo sapiens
  TRBV29-1(TRBV) and TRBJ2-6(TRBJ)  CDR3 amino acids
CSAVITKSGANVLTFG

SEQ ID NO: 1204 - protein, 14 aa, Homo sapiens
  TRBV3-1(TRBV) and TRBJ2-5(TRBJ)  CDR3 amino acids
CASSQARQETQYFG

SEQ ID NO: 1205 - protein, 17 aa, Homo sapiens
  TRBV20-1(TRBV) and TRBJ2-1(TRBJ)  CDR3 amino acids
CSARESTSDPKNEQFFG

SEQ ID NO: 1206 - protein, 16 aa, Homo sapiens
  TRBV10-3(TRBV) and TRBJ2-5(TRBJ)  CDR3 amino acids
CAISEPTGIRRDPVLR

SEQ ID NO: 1207 - protein, 16 aa, Homo sapiens
  TRBV20-1(TRBV) and TRBJ1-5(TRBJ)  CDR3 amino acids
CSASRDENSNQPQHFG

SEQ ID NO: 1208 - protein, 16 aa, Homo sapiens
  TRBV7-7(TRBV) and TRBJ2-5(TRBJ)  CDR3 amino acids
CASSFLTSGSETQYFG

SEQ ID NO: 1209 - protein, 18 aa, Homo sapiens
  TRBV28(TRBV) and TRBJ2-7(TRBJ)  CDR3 amino acids
CASSPTGVGTSSYEQYFG

SEQ ID NO: 1210 - protein, 17 aa, Homo sapiens
  TRBV20-1(TRBV) and TRBJ2-1(TRBJ)  CDR3 amino acids
CSARESTSDTKNEQFFG

SEQ ID NO: 1211 - protein, 16 aa, Homo sapiens
  TRBV15(TRBV) and TRBJ1-2(TRBJ)  CDR3 amino acids
CATSRVSRQGYGYTFG

SEQ ID NO: 1212 - protein, 16 aa, Homo sapiens
  TRBV7-3(TRBV) and TRBJ2-1(TRBJ)  CDR3 amino acids
CASSPTGTRGEKQFFG

SEQ ID NO: 1213 - protein, 15 aa, Homo sapiens
  TRBV20-1(TRBV) and TRBJ1-5(TRBJ)  CDR3 amino acids
CSASRDEIAISPSIL

SEQ ID NO: 1214 - protein, 13 aa, Homo sapiens
  TRBV6-5(TRBV) and TRBJ1-2(TRBJ)  CDR3 amino acids
CASRTGDYGYTFG

SEQ ID NO: 1215 - protein, 16 aa, Homo sapiens
  TRBV4-1(TRBV) and TRBJ2-7(TRBJ)  CDR3 amino acids
CASSHTGGRVYEQYFG

SEQ ID NO: 1216 - protein, 15 aa, Homo sapiens
  TRBV5-6(TRBV) and TRBJ2-7(TRBJ)  CDR3 amino acids
CASSLVGDSYEQYFG

SEQ ID NO: 1217 - protein, 18 aa, Homo sapiens
  TRBV6-3(TRBV) and TRBJ2-7(TRBJ)  CDR3 amino acids
CASSYRLDSEGLYEQYFG

SEQ ID NO: 1218 - protein, 15 aa, Homo sapiens
  TRBV7-2(TRBV) and TRBJ2-7(TRBJ)  CDR3 amino acids
CASSIAGGPYEQYFG

SEQ ID NO: 1219 - protein, 13 aa, Homo sapiens
  TRBV29-1(TRBV) and TRBJ2-1(TRBJ)  CDR3 amino acids
CSVDGPYNEQFFG

SEQ ID NO: 1220 - protein, 19 aa, Homo sapiens
  TRBV15(TRBV) and TRBJ2-3(TRBJ)  CDR3 amino acids
CATSRDTLAGGPEDTQYFG

SEQ ID NO: 1221 - protein, 16 aa, Homo sapiens
  TRBV7-9(TRBV) and TRBJ2-3(TRBJ)  CDR3 amino acids
CASSLVAGGVDTQYFG

SEQ ID NO: 1222 - protein, 14 aa, Homo sapiens
  TRBV28(TRBV) and TRBJ2-5(TRBJ)  CDR3 amino acids
CASSLSGWETQYFG

SEQ ID NO: 1223 - protein, 20 aa, Homo sapiens
  TRBV29-1(TRBV) and TRBJ2-1(TRBJ)  CDR3 amino acids
CSVGHGWREIERSYNEQFFG

SEQ ID NO: 1224 - protein, 13 aa, Homo sapiens
  TRBV5-6(TRBV) and TRBJ2-7(TRBJ)  CDR3 amino acids
CASSLSSYEQYFG

SEQ ID NO: 1225 - protein, 15 aa, Homo sapiens
  TRBV28(TRBV) and TRBJ2-3(TRBJ)  CDR3 amino acids
CASSLTGGADTQYFG

SEQ ID NO: 1226 - protein, 15 aa, Homo sapiens
  TRBV7-3(TRBV) and TRBJ2-1(TRBJ)  CDR3 amino acids
CASSPPGREGRSSSS

SEQ ID NO: 1227 - protein, 16 aa, Homo sapiens
  TRBV10-3(TRBV) and TRBJ2-5(TRBJ)  CDR3 amino acids
CAISEPTGDQKRPSTS

SEQ ID NO: 1228 - protein, 12 aa, Homo sapiens
  TRBV2(TRBV) and TRBJ1-1(TRBJ)  CDR3 amino acids
CASSRAVEAFFG

SEQ ID NO: 1229 - protein, 18 aa, Homo sapiens
  TRBV6-1(TRBV) and TRBJ2-7(TRBJ)  CDR3 amino acids
CASSEDGLAEISYEQYFG

SEQ ID NO: 1230 - protein, 14 aa, Homo sapiens
  TRBV29-1(TRBV) and TRBJ2-7(TRBJ)  CDR3 amino acids
CSVGVSGGYEQYFG

SEQ ID NO: 1231 - protein, 20 aa, Homo sapiens
  TRBV4-1(TRBV) and TRBJ1-6(TRBJ)  CDR3 amino acids
CASSQDLRGWTGVNSPLHFG

SEQ ID NO: 1232 - protein, 18 aa, Homo sapiens
  TRBV5-8(TRBV) and TRBJ2-2(TRBJ)  CDR3 amino acids
CASSLDNRFGGTGELFLE

SEQ ID NO: 1233 - protein, 17 aa, Homo sapiens
  TRBV7-4(TRBV) and TRBJ2-7(TRBJ)  CDR3 amino acids
CASSSNRAGALPTSSTS

SEQ ID NO: 1234 - protein, 14 aa, Homo sapiens
  TRBV12-4(TRBV) and TRBJ1-5(TRBJ)  CDR3 amino acids
CASSPGGGQPQHFG

SEQ ID NO: 1235 - protein, 16 aa, Homo sapiens
  TRBV7-2(TRBV) and TRBJ2-7(TRBJ)  CDR3 amino acids
CASSSATGDLYEQYFG

SEQ ID NO: 1236 - protein, 15 aa, Homo sapiens
  TRBV7-9(TRBV) and TRBJ2-2(TRBJ)  CDR3 amino acids
CASSPTRNTGELFLE

SEQ ID NO: 1237 - protein, 14 aa, Homo sapiens
  TRBV29-1(TRBV) and TRBJ2-2(TRBJ)  CDR3 amino acids
CSARDSNTGELFLE

SEQ ID NO: 1238 - protein, 15 aa, Homo sapiens
  TRBV7-9(TRBV) and TRBJ2-2(TRBJ)  CDR3 amino acids
CASSPTRNTGELFFG

SEQ ID NO: 1239 - protein, 16 aa, Homo sapiens
  TRBV12-4(TRBV) and TRBJ2-6(TRBJ)  CDR3 amino acids
CASSRTGFGANVLTFG

SEQ ID NO: 1240 - protein, 15 aa, Homo sapiens
  TRBV18(TRBV) and TRBJ1-4(TRBJ)  CDR3 amino acids
CASSGGESLNENCFL

SEQ ID NO: 1241 - protein, 17 aa, Homo sapiens
  TRBV20/OR9-2(TRBV) and TRBJ2-1(TRBJ)  CDR3 amino acids
CSARESTSDTKNEQFFG

SEQ ID NO: 1242 - protein, 17 aa, Homo sapiens
  TRBV20/OR9-2(TRBV) and TRBJ2-1(TRBJ)  CDR3 amino acids
CSARESTSESKNEQFFG

SEQ ID NO: 1243 - protein, 16 aa, Homo sapiens
  TRBV27(TRBV) and TRBJ2-1(TRBJ)  CDR3 amino acids
CASSRAGRGLNEQFFG

SEQ ID NO: 1244 - protein, 15 aa, Homo sapiens
  TRBV7-2(TRBV) and TRBJ2-5(TRBJ)  CDR3 amino acids
CASSVINGGETQYFG

SEQ ID NO: 1245 - protein, 12 aa, Homo sapiens
  TRBV29-1(TRBV) and TRBJ2-3(TRBJ)  CDR3 amino acids
CSVSSTDTQYFG

SEQ ID NO: 1246 - protein, 18 aa, Homo sapiens
  TRBV19(TRBV) and TRBJ2-5(TRBJ)  CDR3 amino acids
CASSWGLAVGYQETQYFG

SEQ ID NO: 1247 - protein, 17 aa, Homo sapiens
  TRBV4-2(TRBV) and TRBJ2-1(TRBJ)  CDR3 amino acids
CASSQDQILPYNEQFFG

SEQ ID NO: 1248 - protein, 16 aa, Homo sapiens
  TRBV19(TRBV) and TRBJ2-1(TRBJ)  CDR3 amino acids
CASGHTGSAYNEQFFG

SEQ ID NO: 1249 - protein, 17 aa, Homo sapiens
  TRBV20-1(TRBV) and TRBJ2-1(TRBJ)  CDR3 amino acids
CSARESTSDPKNEQFFG

SEQ ID NO: 1250 - protein, 15 aa, Homo sapiens
  TRBV29-1(TRBV) and TRBJ2-5(TRBJ)  CDR3 amino acids
CSVEAKEGLRTQYFG

SEQ ID NO: 1251 - protein, 14 aa, Homo sapiens
  TRBV7-3(TRBV) and TRBJ1-6(TRBJ)  CDR3 amino acids
CASSLNRGSPLHFG

SEQ ID NO: 1252 - protein, 17 aa, Homo sapiens
  TRBV4-1(TRBV) and TRBJ2-5(TRBJ)  CDR3 amino acids
CASSKPGLAVQETQYFG

SEQ ID NO: 1253 - protein, 14 aa, Homo sapiens
  TRBV20-1(TRBV) and TRBJ2-5(TRBJ)  CDR3 amino acids
CSARTAGLGTQYFG

SEQ ID NO: 1254 - protein, 14 aa, Homo sapiens
  TRBV27(TRBV) and TRBJ1-2(TRBJ)  CDR3 amino acids
CASRPTALGGYTFG

SEQ ID NO: 1255 - protein, 15 aa, Homo sapiens
  TRBV5-7(TRBV) and TRBJ1-5(TRBJ)  CDR3 amino acids
CAPRNHQIAISPSIL

SEQ ID NO: 1256 - protein, 17 aa, Homo sapiens
  TRBV7-9(TRBV) and TRBJ2-1(TRBJ)  CDR3 amino acids
CASSLGGRASYNEQFFG

SEQ ID NO: 1257 - protein, 17 aa, Homo sapiens
  TRBV11-1(TRBV) and TRBJ2-1(TRBJ)  CDR3 amino acids
CASSLMLAPLYNEQFFG

SEQ ID NO: 1258 - protein, 19 aa, Homo sapiens
  TRBV15(TRBV) and TRBJ2-3(TRBJ)  CDR3 amino acids
CATSRDTLAGGPEDTQYFG

SEQ ID NO: 1259 - protein, 16 aa, Homo sapiens
  TRBV11-1(TRBV) and TRBJ2-5(TRBJ)  CDR3 amino acids
CASSRDRGRQETQYFG

SEQ ID NO: 1260 - protein, 15 aa, Homo sapiens
  TRBV20-1(TRBV) and TRBJ2-1(TRBJ)  CDR3 amino acids
CSAPPGLAINEQFFG

SEQ ID NO: 1261 - protein, 16 aa, Homo sapiens
  TRBV20-1(TRBV) and TRBJ2-1(TRBJ)  CDR3 amino acids
CSARGWAGPYNEQFFG

SEQ ID NO: 1262 - protein, 14 aa, Homo sapiens
  TRBV12-4(TRBV) and TRBJ2-5(TRBJ)  CDR3 amino acids
CASSFGTPKRPSTS

SEQ ID NO: 1263 - protein, 15 aa, Homo sapiens
  TRBV11-2(TRBV) and TRBJ2-1(TRBJ)  CDR3 amino acids
CASSLVGLYNEQFFG

SEQ ID NO: 1264 - protein, 15 aa, Homo sapiens
  TRBV20-1(TRBV) and TRBJ2-3(TRBJ)  CDR3 amino acids
CSATGDSKINTQYFG

SEQ ID NO: 1265 - protein, 16 aa, Homo sapiens
  TRBV5-6(TRBV) and TRBJ2-1(TRBJ)  CDR3 amino acids
CASRSLWSSYNEQFFG

SEQ ID NO: 1266 - protein, 15 aa, Homo sapiens
  TRBV5-6(TRBV) and TRBJ1-1(TRBJ)  CDR3 amino acids
CASNPTEENTEAFFG

SEQ ID NO: 1267 - protein, 15 aa, Homo sapiens
  TRBV12-4(TRBV) and TRBJ2-5(TRBJ)  CDR3 amino acids
CASSFGTPQETQYFG

SEQ ID NO: 1268 - protein, 16 aa, Homo sapiens
  TRBV7-9(TRBV) and TRBJ2-1(TRBJ)  CDR3 amino acids
CASSQSRRAHNEQFFG

SEQ ID NO: 1269 - protein, 17 aa, Homo sapiens
  TRBV15(TRBV) and TRBJ2-1(TRBJ)  CDR3 amino acids
CATSREGLAGENEQFFG

SEQ ID NO: 1270 - protein, 17 aa, Homo sapiens
  TRBV12-5(TRBV) and TRBJ1-4(TRBJ)  CDR3 amino acids
CASGLESLGHLNENCFW

SEQ ID NO: 1271 - protein, 16 aa, Homo sapiens
  TRBV19(TRBV) and TRBJ1-5(TRBJ)  CDR3 amino acids
CASSIRDRSNQPQHFG

SEQ ID NO: 1272 - protein, 16 aa, Homo sapiens
  TRBV20-1(TRBV) and TRBJ1-3(TRBJ)  CDR3 amino acids
CSARRFGDGGDTIYFG

SEQ ID NO: 1273 - protein, 14 aa, Homo sapiens
  TRBV5-6(TRBV) and TRBJ2-2(TRBJ)  CDR3 amino acids
CASSLSVGGELFFG

SEQ ID NO: 1274 - protein, 15 aa, Homo sapiens
  TRBV6-3(TRBV) and TRBJ2-3(TRBJ)  CDR3 amino acids
CASSLAGVADTQYFG

SEQ ID NO: 1275 - protein, 15 aa, Homo sapiens
  TRBV7-9(TRBV) and TRBJ2-2(TRBJ)  CDR3 amino acids
CASSPGQYTGELFFG

SEQ ID NO: 1276 - protein, 17 aa, Homo sapiens
  TRBV11-3(TRBV) and TRBJ2-5(TRBJ)  CDR3 amino acids
CASSSTPTSGSRRPSTS

SEQ ID NO: 1277 - protein, 14 aa, Homo sapiens
  TRBV19(TRBV) and TRBJ1-1(TRBJ)  CDR3 amino acids
CASSQRRATEAFFG

SEQ ID NO: 1278 - protein, 16 aa, Homo sapiens
  TRBV27(TRBV) and TRBJ2-7(TRBJ)  CDR3 amino acids
CASTPQVGGINEQYFG

SEQ ID NO: 1279 - protein, 13 aa, Homo sapiens
  TRBV6-1(TRBV) and TRBJ2-3(TRBJ)  CDR3 amino acids
CASHRAPDTQYFG

SEQ ID NO: 1280 - protein, 16 aa, Homo sapiens
  TRBV6-1(TRBV) and TRBJ2-7(TRBJ)  CDR3 amino acids
CASTGRRQLTYEQYFG

SEQ ID NO: 1281 - protein, 14 aa, Homo sapiens
  TRBV10-3(TRBV) and TRBJ2-5(TRBJ)  CDR3 amino acids
CAISPGQEETQYFG

SEQ ID NO: 1282 - protein, 14 aa, Homo sapiens
  TRBV11-2(TRBV) and TRBJ1-2(TRBJ)  CDR3 amino acids
CASSLGRYYGYTFG

SEQ ID NO: 1283 - protein, 12 aa, Homo sapiens
  TRBV30(TRBV) and TRBJ2-2(TRBJ)  CDR3 amino acids
CAWSSGGELFLE

SEQ ID NO: 1284 - protein, 14 aa, Homo sapiens
  TRBV5-4(TRBV) and TRBJ1-1(TRBJ)  CDR3 amino acids
CASSLGQAKEAFFG

SEQ ID NO: 1285 - protein, 16 aa, Homo sapiens
  TRBV10-1(TRBV) and TRBJ2-1(TRBJ)  CDR3 amino acids
AASSEQLSSYNEQFFG

SEQ ID NO: 1286 - protein, 16 aa, Homo sapiens
  TRBV10-1(TRBV) and TRBJ2-1(TRBJ)  CDR3 amino acids
CASSEQLSSYNEQFFR

SEQ ID NO: 1287 - protein, 15 aa, Homo sapiens
  TRBV10-1(TRBV) and TRBJ2-1(TRBJ)  CDR3 amino acids
CASSTGQDRVMSSSS

SEQ ID NO: 1288 - protein, 16 aa, Homo sapiens
  TRBV10-1(TRBV) and TRBJ2-1(TRBJ)  CDR3 amino acids
CASSTRGQDRVMSSSS

SEQ ID NO: 1289 - protein, 20 aa, Homo sapiens
  TRBV10-2(TRBV) and TRBJ1-5(TRBJ)  CDR3 amino acids
CAQILGGDRGAGGKSAPSIF

SEQ ID NO: 1290 - protein, 19 aa, Homo sapiens
  TRBV10-2(TRBV) and TRBJ1-5(TRBJ)  CDR3 amino acids
CAQILGGDRGLGESAPAFW

SEQ ID NO: 1291 - protein, 19 aa, Homo sapiens
  TRBV10-2(TRBV) and TRBJ1-5(TRBJ)  CDR3 amino acids
CAQILGGDRGLGGISPSIL

SEQ ID NO: 1292 - protein, 18 aa, Homo sapiens
  TRBV10-2(TRBV) and TRBJ1-5(TRBJ)  CDR3 amino acids
CARFSEGQGAGGISPSIL

SEQ ID NO: 1293 - protein, 18 aa, Homo sapiens
  TRBV10-2(TRBV) and TRBJ1-5(TRBJ)  CDR3 amino acids
CARFSEGRGAGGISPSIL

SEQ ID NO: 1294 - protein, 19 aa, Homo sapiens
  TRBV10-2(TRBV) and TRBJ1-5(TRBJ)  CDR3 amino acids
CARFSEGRGGWGNQPQHFG

SEQ ID NO: 1295 - protein, 19 aa, Homo sapiens
  TRBV10-2(TRBV) and TRBJ1-5(TRBJ)  CDR3 amino acids
CARFSEGTGGSGESAPAFW

SEQ ID NO: 1296 - protein, 19 aa, Homo sapiens
  TRBV10-2(TRBV) and TRBJ1-5(TRBJ)  CDR3 amino acids
  misc_feature (19)..(19): Xaa can be any naturally occurring amino acid
CARFSEGTGGWGDQPQHFX

SEQ ID NO: 1297 - protein, 19 aa, Homo sapiens
  TRBV10-2(TRBV) and TRBJ1-5(TRBJ)  CDR3 amino acids
CARFSEGTGGWGESAPSIF

SEQ ID NO: 1298 - protein, 19 aa, Homo sapiens
  TRBV10-2(TRBV) and TRBJ1-5(TRBJ)  CDR3 amino acids
CARFSEGTGGWGNQPPAFL

SEQ ID NO: 1299 - protein, 18 aa, Homo sapiens
  TRBV10-2(TRBV) and TRBJ1-5(TRBJ)  CDR3 amino acids
CASFSEGQGLGESAPAFW

SEQ ID NO: 1300 - protein, 19 aa, Homo sapiens
  TRBV10-2(TRBV) and TRBJ1-5(TRBJ)  CDR3 amino acids
RARFSEGTGGWGNQPQHFG

SEQ ID NO: 1301 - protein, 20 aa, Homo sapiens
  TRBV10-2(TRBV) and TRBJ1-5(TRBJ)  CDR3 amino acids
  misc_feature (1)..(1): Xaa can be any naturally occurring amino acid
XAQILGGDRGAGGNQPQHFG

SEQ ID NO: 1302 - protein, 19 aa, Homo sapiens
  TRBV10-2(TRBV) and TRBJ1-5(TRBJ)  CDR3 amino acids
  misc_feature (1)..(1): Xaa can be any naturally occurring amino acid
XARFSEGTGGLGGISPSIL

SEQ ID NO: 1303 - protein, 16 aa, Homo sapiens
  TRBV10-3(TRBV) and TRBJ1-3(TRBJ)  CDR3 amino acids
CAISPNRGGLETPYIL

SEQ ID NO: 1304 - protein, 17 aa, Homo sapiens
  TRBV10-3(TRBV) and TRBJ1-3(TRBJ)  CDR3 amino acids
CAISPNRGGSGNTIYFG

SEQ ID NO: 1305 - protein, 15 aa, Homo sapiens
  TRBV10-3(TRBV) and TRBJ2-3(TRBJ)  CDR3 amino acids
CAIRPSGPHRYAVFL

SEQ ID NO: 1306 - protein, 15 aa, Homo sapiens
  TRBV10-3(TRBV) and TRBJ2-3(TRBJ)  CDR3 amino acids
  misc_feature (13)..(13): Xaa can be any naturally occurring amino acid
CAIRPSGPTDTQXLA

SEQ ID NO: 1307 - protein, 14 aa, Homo sapiens
  TRBV10-3(TRBV) and TRBJ2-3(TRBJ)  CDR3 amino acids
CAISIEAVQIRSIL

SEQ ID NO: 1308 - protein, 15 aa, Homo sapiens
  TRBV10-3(TRBV) and TRBJ2-3(TRBJ)  CDR3 amino acids
  misc_feature (8)..(8): Xaa can be any naturally occurring amino acid
  misc_feature (10)..(10): Xaa can be any naturally occurring amino acid
CAISIEAXTXTQYFA

SEQ ID NO: 1309 - protein, 13 aa, Homo sapiens
  TRBV10-3(TRBV) and TRBJ2-3(TRBJ)  CDR3 amino acids
CAISSTTDTQYFW

SEQ ID NO: 1310 - protein, 16 aa, Homo sapiens
  TRBV10-3(TRBV) and TRBJ2-5(TRBJ)  CDR3 amino acids
CAISEPTGIRRDPVLR

SEQ ID NO: 1311 - protein, 16 aa, Homo sapiens
  TRBV10-3(TRBV) and TRBJ2-7(TRBJ)  CDR3 amino acids
CAISESASGSYEQYFG

SEQ ID NO: 1312 - protein, 12 aa, Homo sapiens
  TRBV11-1(TRBV) and TRBJ2-1(TRBJ)  CDR3 amino acids
CASRLYTEQFFG

SEQ ID NO: 1313 - protein, 13 aa, Homo sapiens
  TRBV11-1(TRBV) and TRBJ2-1(TRBJ)  CDR3 amino acids
CASSFGGLLSSSS

SEQ ID NO: 1314 - protein, 14 aa, Homo sapiens
  TRBV11-1(TRBV) and TRBJ2-1(TRBJ)  CDR3 amino acids
CASSFPGGLLSSSS

SEQ ID NO: 1315 - protein, 11 aa, Homo sapiens
  TRBV11-1(TRBV) and TRBJ2-1(TRBJ)  CDR3 amino acids
CASSFTMSSSS

SEQ ID NO: 1316 - protein, 12 aa, Homo sapiens
  TRBV11-1(TRBV) and TRBJ2-1(TRBJ)  CDR3 amino acids
CASSVFTMSSSS

SEQ ID NO: 1317 - protein, 12 aa, Homo sapiens
  TRBV11-1(TRBV) and TRBJ2-1(TRBJ)  CDR3 amino acids
  misc_feature (3)..(3): Xaa can be any naturally occurring amino acid
CAXSFYNEQFFG

SEQ ID NO: 1318 - protein, 12 aa, Homo sapiens
  TRBV11-1(TRBV) and TRBJ2-1(TRBJ)  CDR3 amino acids
VPSSFYNEQFFR

SEQ ID NO: 1319 - protein, 14 aa, Homo sapiens
  TRBV11-1(TRBV) and TRBJ2-3(TRBJ)  CDR3 amino acids
CASSFRSCRYAVFW

SEQ ID NO: 1320 - protein, 14 aa, Homo sapiens
  TRBV11-1(TRBV) and TRBJ2-3(TRBJ)  CDR3 amino acids
CASSLDRADTQYFG

SEQ ID NO: 1321 - protein, 13 aa, Homo sapiens
  TRBV11-1(TRBV) and TRBJ2-3(TRBJ)  CDR3 amino acids
CASTLRFRIRSIL

SEQ ID NO: 1322 - protein, 15 aa, Homo sapiens
  TRBV11-1(TRBV) and TRBJ2-5(TRBJ)  CDR3 amino acids
CASSFRPGTETPVLR

SEQ ID NO: 1323 - protein, 11 aa, Homo sapiens
  TRBV11-1(TRBV) and TRBJ2-5(TRBJ)  CDR3 amino acids
CASSSETQYFG

SEQ ID NO: 1324 - protein, 15 aa, Homo sapiens
  TRBV11-1(TRBV) and TRBJ1-1(TRBJ)  CDR3 amino acids
CASSLQGANTEAFFG

SEQ ID NO: 1325 - DNA, 10 bp, artificial sequence
  Tag sequence
acgagtgcgt

SEQ ID NO: 1326 - DNA, 10 bp, artificial sequence
  Tag sequence
acgctcgaca

SEQ ID NO: 1327 - DNA, 10 bp, artificial sequence
  Tag sequence
agacgcactc

SEQ ID NO: 1328 - DNA, 10 bp, artificial sequence
  Tag sequence
agcactgtag

SEQ ID NO: 1329 - DNA, 10 bp, artificial sequence
  Tag sequence
atcagacacg

SEQ ID NO: 1330 - DNA, 10 bp, artificial sequence
  Tag sequence
atatcgcgag

SEQ ID NO: 1331 - DNA, 10 bp, artificial sequence
  Tag sequence
cgtgtctcta

SEQ ID NO: 1332 - DNA, 10 bp, artificial sequence
  Tag sequence
ctcgcgtgtc

SEQ ID NO: 1333 - DNA, 10 bp, artificial sequence
  Tag sequence
tagtatcagc

SEQ ID NO: 1334 - DNA, 10 bp, artificial sequence
  Tag sequence
tctctatgcg

SEQ ID NO: 1335 - DNA, 10 bp, artificial sequence
  Tag sequence
tgatacgtct

SEQ ID NO: 1336 - DNA, 10 bp, artificial sequence
  IGHD  CDR3 amino acids
tactgagcta

SEQ ID NO: 1337 - DNA, 10 bp, artificial sequence
  Tag sequence
catagtagtg

SEQ ID NO: 1338 - DNA, 10 bp, artificial sequence
  Tag sequence
cgagagatac

SEQ ID NO: 1339 - DNA, 10 bp, artificial sequence
  Tag sequence
atacgacgta

SEQ ID NO: 1340 - DNA, 10 bp, artificial sequence
  Tag sequence
tcacgtacta

SEQ ID NO: 1341 - DNA, 10 bp, artificial sequence
  Tag sequence
cgtctagtac

SEQ ID NO: 1342 - DNA, 10 bp, artificial sequence
  Tag sequence
tctacgtagc

SEQ ID NO: 1343 - DNA, 10 bp, artificial sequence
  Tag sequence
tgtactactc

SEQ ID NO: 1344 - DNA, 10 bp, artificial sequence
  Tag sequence
acgactacag

SEQ ID NO: 1345 - DNA, 10 bp, artificial sequence
  Tag sequence
cgtagactag

SEQ ID NO: 1346 - DNA, 10 bp, artificial sequence
  Tag sequence
tacgagtatg

SEQ ID NO: 1347 - DNA, 10 bp, artificial sequence
  Tag sequence
tactctcgtg

SEQ ID NO: 1348 - DNA, 10 bp, artificial sequence
  Tag sequence
tagagacgag

SEQ ID NO: 1349 - DNA, 10 bp, artificial sequence
  Tag sequence
tcgtcgctcg

SEQ ID NO: 1350 - DNA, 10 bp, artificial sequence
  Tag sequence
acatacgcgt

SEQ ID NO: 1351 - DNA, 11 bp, artificial sequence
  Tag sequence
acacgacgact

SEQ ID NO: 1352 - DNA, 11 bp, artificial sequence
  Tag sequence
acacgtagtat

SEQ ID NO: 1353 - DNA, 11 bp, artificial sequence
  Tag sequence
acactactcgt

SEQ ID NO: 1354 - DNA, 11 bp, artificial sequence
  Tag sequence
acgacacgtat

SEQ ID NO: 1355 - DNA, 11 bp, artificial sequence
  Tag sequence
acgagtagact

SEQ ID NO: 1356 - DNA, 11 bp, artificial sequence
  Tag sequence
acgcgtctagt

SEQ ID NO: 1357 - DNA, 11 bp, artificial sequence
  Tag sequence
acgtacacact

SEQ ID NO: 1358 - DNA, 11 bp, artificial sequence
  Tag sequence
acgtactgtgt

SEQ ID NO: 1359 - DNA, 11 bp, artificial sequence
  IGHD  CDR3 amino acids
acgtagatcgt

SEQ ID NO: 1360 - DNA, 11 bp, artificial sequence
  Tag sequence
actacgtctct

SEQ ID NO: 1361 - DNA, 11 bp, artificial sequence
  Tag sequence
actatacgagt

SEQ ID NO: 1362 - DNA, 11 bp, artificial sequence
  Tag sequence
actcgcgtcgt

SEQ ID NO: 1363 - DNA, 11 bp, artificial sequence
  Tag sequence
agtcgtggtgt

SEQ ID NO: 1364 - DNA, 11 bp, artificial sequence
  Tag sequence
atactaggtgt

SEQ ID NO: 1365 - DNA, 11 bp, artificial sequence
  Tag sequence
acgagtggtgt

SEQ ID NO: 1366 - DNA, 11 bp, artificial sequence
  Tag sequence
atacgtggcgt

SEQ ID NO: 1367 - DNA, 11 bp, artificial sequence
  Tag sequence
agtctacgcgt

SEQ ID NO: 1368 - DNA, 11 bp, artificial sequence
  Tag sequence
actagaggcgt

SEQ ID NO: 1369 - DNA, 11 bp, artificial sequence
  Tag sequence
agtgtgtgcgt

SEQ ID NO: 1370 - DNA, 11 bp, artificial sequence
  Tag sequence
acacagtgcgt

SEQ ID NO: 1371 - DNA, 11 bp, artificial sequence
  Tag sequence
acgatctgcgt

SEQ ID NO: 1372 - DNA, 11 bp, artificial sequence
  Tag sequence
agagacggagt

SEQ ID NO: 1373 - DNA, 11 bp, artificial sequence
  Tag sequence
actcgtagagt

SEQ ID NO: 1374 - DNA, 11 bp, artificial sequence
  Tag sequence
acgacgggagt

SEQ ID NO: 1375 - DNA, 26 bp, artificial sequence
  B adaptor
cctatcccctgtgtgccttggcagtc

SEQ ID NO: 1376 - DNA, 423 bp, artificial sequence
  TRAC*01  primer
  misc_feature (1)..(1): n is a, c, g, t or u
natatccagaaccctgaccctgccgtgtaccagctgagagactctaaatccagtgacaagtctgtctgcctattcaccgattttgattctcaaacaaatgtgtcacaaagtaaggattctgatgtgtatatcacagacaaaactgtgctagacatgaggtctatggacttcaagagcaacagtgctgtggcctggagcaacaaatctgactttgcatgtgcaaacgccttcaacaacagcattattccagaagacaccttcttccccagcccagaaagttcctgtgatgtcaagctggtcgagaaaagctttgaaacagatacgaacctaaactttcaaaacctgtcagtgattgggttccgaatcctcctcctgaaagtggccgggtttaatctgctcatgacgctgcggctgtggtccagc

SEQ ID NO: 1377 - DNA, 537 bp, artificial sequence
  TRBC2  primer
gaggacctgaaaaacgtgttcccacccgaggtcgctgtgtttgagccatcagaagcagagatctcccacacccaaaaggccacactggtgtgcctggccacaggcttctaccccgaccacgtggagctgagctggtgggtgaatgggaaggaggtgcacagtggggtcagcacagacccgcagcccctcaaggagcagcccgccctcaatgactccagatactgcctgagcagccgcctgagggtctcggccaccttctggcagaacccccgcaaccacttccgctgtcaagtccagttctacgggctctcggagaatgacgagtggacccaggatagggccaaacctgtcacccagatcgtcagcgccgaggcctggggtagagcagactgtggcttcacctccgagtcttaccagcaaggggtcctgtctgccaccatcctctatgagatcttgctagggaaggccaccttgtatgccgtgctggtcagtgccctcgtgctgatggccatggtcaagagaaaggattccagaggc

SEQ ID NO: 1378 - DNA, 519 bp, artificial sequence
  TRGC1*01  primer
gataaacaacttgatgcagatgtttcccccaagcccactatttttcttccttcaattgctgaaacaaagctccagaaggctggaacatacctttgtcttcttgagaaatttttccctgatgttattaagatacattggcaagaaaagaagagcaacacgattctgggatcccaggaggggaacaccatgaagactaacgacacatacatgaaatttagctggttaacggtgccagaaaagtcactggacaaagaacacagatgtatcgtcagacatgagaataataaaaacggagttgatcaagaaattatctttcctccaataaagacagatgtcatcacaatggatcccaaagacaattgttcaaaagatgcaaatgatacactactgctgcagctcacaaacacctctgcatattacatgtacctcctcctgctcctcaagagtgtggtctattttgccatcatcacctgctgtctgcttagaagaacggctttctgctgcaatggagagaaatca

SEQ ID NO: 1379 - DNA, 466 bp, artificial sequence
  TRDC*01  primer
  misc_feature (1)..(1): n is a, c, g, t or u
ngaagtcagcctcataccaaaccatccgtttttgtcatgaaaaatggaacaaatgtcgcttgtctggtgaaggaattctaccccaaggatataagaataaatctcgtgtcatccaagaagataacagagtttgatcctgctattgtcatctctcccagtgggaagtacaatgctgtcaagcttggtaaatatgaagattcaaattcagtgacatgttcagttcaacacgacaataaaactgtgcactccactgactttgaagtgaagacagattctacagatcacgtaaaaccaaaggaaactgaaaacacaaagcaaccttcaaagagctgccataaacccaaagccatagttcataccgagaaggtgaacatgatgtccctcacagtgcttgggctacgaatgctgtttgcaaagactgttgccgtcaattttctcttgactgccaagttatttttcttgtaag

SEQ ID NO: 1380 - DNA, 1419 bp, artificial sequence
  IGHM*01  primer
gggagtgcatccgccccaacccttttccccctcgtctcctgtgagaattccccgtcggatacgagcagcgtggccgttggctgcctcgcacaggacttccttcccgactccatcactttgtcctggaaatacaagaacaactctgacatcagcagtacccggggcttcccatcagtcctgagagggggcaagtacgcagccacctcacaggtgctgctgccttccaaggacgtcatgcagggcacagacgaacacgtggtgtgcaaagtccagcaccccaacggcaacaaagaaaagaacgtgcctcttccagtgattgccgagctgcctcccaaagtgagcgtcttcgtcccaccccgcgacggcttcttcggcaacccccgcaagtccaagctcatctgccaggccacgggtttcagtccccggcagattcaggtgtcctggctgcgcgaggggaagcaggtggggtctggcgtcaccacggaccaggtgcaggctgaggccaaagagtctgggcccacgacctacaaggtgaccagcacactgaccatcaaagagagcgactggctcggccagagcatgttcacctgccgcgtggatcacaggggcctgaccttccagcagaatgcgtcctccatgtgtgtccccgatcaagacacagccatccgggtcttcgccatccccccatcctttgccagcatcttcctcaccaagtccaccaagttgacctgcctggtcacagacctgaccacctatgacagcgtgaccatctcctggacccgccagaatggcgaagctgtgaaaacccacaccaacatctccgagagccaccccaatgccactttcagcgccgtgggtgaggccagcatctgcgaggatgactggaattccggggagaggttcacgtgcaccgtgacccacacagacctgccctcgccactgaagcagaccatctcccggcccaagggggtggccctgcacaggcccgatgtctacttgctgccaccagcccgggagcagctgaacctgcgggagtcggccaccatcacgtgcctggtgacgggcttctctcccgcggacgtcttcgtgcagtggatgcagagggggcagcccttgtccccggagaagtatgtgaccagcgccccaatgcctgagccccaggccccaggccggtacttcgcccacagcatcctgaccgtgtccgaagaggaatggaacacgggggagacctacacctgcgtggcccatgaggccctgcccaacagggtcaccgagaggaccgtggacaagtccaccgagggggaggtgagcgccgacgaggagggctttgagaacctgtgggccaccgcctccaccttcatcgtcctcttcctcctgagcctcttctacagtaccaccgtcaccttgttcaaggtgaaa

SEQ ID NO: 1381 - DNA, 1059 bp, artificial sequence
  IGHA1*01  primer
gcatccccgaccagccccaaggtcttcccgctgagcctctgcagcacccagccagatgggaacgtggtcatcgcctgcctggtccagggcttcttcccccaggagccactcagtgtgacctggagcgaaagcggacagggcgtgaccgccagaaacttcccacccagccaggatgcctccggggacctgtacaccacgagcagccagctgaccctgccggccacacagtgcctagccggcaagtccgtgacatgccacgtgaagcactacacgaatcccagccaggatgtgactgtgccctgcccagttccctcaactccacctaccccatctccctcaactccacctaccccatctccctcatgctgccacccccgactgtcactgcaccgaccggccctcgaggacctgctcttaggttcagaagcgaacctcacgtgcacactgaccggcctgagagatgcctcaggtgtcaccttcacctggacgccctcaagtgggaagagcgctgttcaaggaccacctgagcgtgacctctgtggctgctacagcgtgtccagtgtcctgccgggctgtgccgagccatggaaccatgggaagaccttcacttgcactgctgcctaccccgagtccaagaccccgctaaccgccaccctctcaaaatccggaaacacattccggcccgaggtccacctgctgccgccgccgtcggaggagctggccctgaacgagctggtgacgctgacgtgcctggcacgcggcttcagccccaaggacgtgctggttcgctggctgcaggggtcacaggagctgccccgcgagaagtacctgacttgggcatcccggcaggagcccagccagggcaccaccaccttcgctgtgaccagcatactgcgcgtggcagccgaggactggaagaagggggacaccttctcctgcatggtgggccacgaggccctgccgctggccttcacacagaagaccatcgaccgcttggcgggtaaacccacccatgtcaatgtgtctgttgtcatggcggaggtggacggcacctgctac

SEQ ID NO: 1382 - DNA, 990 bp, artificial sequence
  IGHG1*01  primer
gcctccaccaagggcccatcggtcttccccctggcaccctcctccaagagcacctctgggggcacagcggccctgggctgcctggtcaaggactacttccccgaaccggtgacggtgtcgtggaactcaggcgccctgaccagcggcgtgcacaccttcccggctgtcctacagtcctcaggactctactccctcagcagcgtggtgaccgtgccctccagcagcttgggcacccagacctacatctgcaacgtgaatcacaagcccagcaacaccaaggtggacaagaaagttgagcccaaatcttgtgacaaaactcacacatgcccaccgtgcccagcacctgaactcctggggggaccgtcagtcttcctcttccccccaaaacccaaggacaccctcatgatctcccggacccctgaggtcacatgcgtggtggtggacgtgagccacgaagaccctgaggtcaagttcaactggtacgtggacggcgtggaggtgcataatgccaagacaaagccgcgggaggagcagtacaacagcacgtaccgggtggtcagcgtcctcaccgtcctgcaccaggactggctgaatggcaaggagtacaagtgcaaggtctccaacaaagccctcccagcccccatcgagaaaaccatctccaaagccaaagggcagccccgagaaccacaggtgtacaccctgcccccatcccgggatgagctgaccaagaaccaggtcagcctgacctgcctggtcaaaggcttctatcccagcgacatcgccgtggagtgggagagcaatgggcagccggagaacaactacaagaccacgcctcccgtgctggactccgacggctccttcttcctctacagcaagctcaccgtggacaagagcaggtggcagcaggggaacgtcttctcatgctccgtgatgcatgaggctctgcacaaccactacacgcagaagagcctctccctgtctccgggtaaa

SEQ ID NO: 1383 - DNA, 1290 bp, artificial sequence
  IGHD*01  primer
gcacccaccaaggctccggatgtgttccccatcatatcagggtgcagacacccaaaggataacagccctgtggtcctggcatgcttgataactgggtaccacccaacgtccgtgactgtcacctggtacatggggacacagagccagccccagagaaccttccctgagatacaaagacgggacagctactacatgacaagcagccagctctccacccccctccagcagtggcgccaaggcgagtacaaatgcgtggtccagcacaccgccagcaagagtaagaaggagatcttccgctggccagagtctccaaaggcacaggcctcctccgtgcccactgcacaaccccaagcagagggcagcctcgccaaggcaaccacagccccagccaccacccgtaacacaggaagaggaggagaagagaagaagaaggagaaggagaaagaggaacaagaagagagagagacaaagacaccagagtgtccgagccacacccagcctcttggcgtctacctgctaacccctgcagtgcaggacctgtggctccgggacaaagccaccttcacctgcttcgtggtgggcagtgacctgaaggatgctcacctgacctgggaggtggctgggaaggtccccacagggggcgtggaggaagggctgctggagcggcacagcaacggctcccagagccagcacagccgtctgaccctgcccaggtccttgtggaacgcggggacctccgtcacctgcacactgaaccatcccagcctcccaccccagaggttgatggcgctgagagaacccgctgcgcaggcacccgtcaagctttctctgaacctgctggcctcgtctgaccctcccgaggcggcctcgtggctcctgtgtgaggtgtctggcttctcgccccccaacatcctcctgatgtggctggaggaccagcgtgaggtgaacacttctgggtttgcccccgcacgcccccctccacagcccaggagcaccacgttctgggcctggagtgtgctgcgtgtcccagccccgcccagccctcagccagccacctacacgtgtgtggtcagccacgaggactcccggactctgctcaacgccagccggagcctagaagtcagctacctggccatgacccccctgatccctcagagcaaggatgagaacagcgatgactacacgacctttgatgatgtgggcagcctgtggaccaccctgtccacgtttgtggccctcttcatcctcaccctcctctacagcggcattgtcactttcatcaaggtgaag

SEQ ID NO: 1384 - DNA, 1284 bp, artificial sequence
  IGHE*01  primer
gcctccacacagagcccatccgtcttccccttgacccgctgctgcaaaaacattccctccaatgccacctccgtgactctgggctgcctggccacgggctacttcccggagccggtgatggtgacctgcgacacaggctccctcaacgggacaactatgaccttaccagccaccaccctcacgctctctggtcactatgccaccatcagcttgctgaccgtctcgggtgcgtgggccaagcagatgttcacctgccgtgtggcacacactccatcgtccacagactgggtcgacaacaaaaccttcagcgtctgctccagggacttcaccccgcccaccgtgaagatcttacagtcgtcctgcgacggcggcgggcacttccccccgaccatccagctcctgtgcctcgtctctgggtacaccccagggactatcaacatcacctggctggaggacgggcaggtcatggacgtggacttgtccaccgcctctaccacgcaggagggtgagctggcctccacacaaagcgagctcaccctcagccagaagcactggctgtcagaccgcacctacacctgccaggtcacctatcaaggtcacacctttgaggacagcaccaagaagtgtgcagattccaacccgagaggggtgagcgcctacctaagccggcccagcccgttcgacctgttcatccgcaagtcgcccacgatcacctgtctggtggtggacctggcacccagcaaggggaccgtgaacctgacctggtcccgggccagtgggaagcctgtgaaccactccaccagaaaggaggagaagcagcgcaatggcacgttaaccgtcacgtccaccctgccggtgggcacccgagactggatcgagggggagacctaccagtgcagggtgacccacccccacctgcccagggccctcatgcggtccacgaccaagaccagcggcccgcgtgctgccccggaagtctatgcgtttgcgacgccggagtggccggggagccgggacaagcgcaccctcgcctgcctgatccagaacttcatgcctgaggacatctcggtgcagtggctgcacaacgaggtgcagctcccggacgcccggcacagcacgacgcagccccgcaagaccaagggctccggcttcttcgtcttcagccgcctggaggtgaccagggccgaatgggagcagaaagatgagttcatctgccgtgcagtccatgaggcagcgagcccctcacagaccgtccagcgagcggtgtctgtaaatcccggtaaa

SEQ ID NO: 1385 - DNA, 321 bp, artificial sequence
  IGKC*01  primer
cgaactgtggctgcaccatctgtcttcatcttcccgccatctgatgagcagttgaaatctggaactgcctctgttgtgtgcctgctgaataacttctatcccagagaggccaaagtacagtggaaggtggataacgccctccaatcgggtaactcccaggagagtgtcacagagcaggacagcaaggacagcacctacagcctcagcagcaccctgacgctgagcaaagcagactacgagaaacacaaagtctacgcctgcgaagtcacccatcagggcctgagctcgcccgtcacaaagagcttcaacaggggagagtgt

SEQ ID NO: 1386 - DNA, 312 bp, artificial sequence
  IGLC1*01  primer
cccaaggccaaccccacggtcactctgttcccgccctcctctgaggagctccaagccaacaaggccacactagtgtgtctgatcagtgacttctacccgggagctgtgacagtggcttggaaggcagatggcagccccgtcaaggcgggagtggagacgaccaaaccctccaaacagagcaacaacaagtacgcggccagcagctacctgagcctgacgcccgagcagtggaagtcccacagaagctacagctgccaggtcacgcatgaagggagcaccgtggagaagacagtggcccctacagaatgttca

SEQ ID NO: 1387 - DNA, 19 bp, artificial sequence
  Specific sequence in CM3-GS (CM3)
aaagggttggggcggatgc

SEQ ID NO: 1388 - DNA, 20 bp, artificial sequence
  Specific sequence in CA3-GS (CA3)
ccgctttcgctccaggtcac

SEQ ID NO: 1389 - DNA, 21 bp, artificial sequence
  Specific sequence in CG3-GS (CG3)
tgagttccacgacaccgtcac

SEQ ID NO: 1390 - DNA, 19 bp, artificial sequence
  Specific sequence in CD3-GS (CD3)
cccagttatcaagcatgcc

SEQ ID NO: 1391 - DNA, 20 bp, artificial sequence
  Specific sequence in CE3-GS (CE3)
cattggagggaatgtttttg

SEQ ID NO: 1392 - DNA, 537 bp, artificial sequence; identical to SEQ ID NO: 1377
  TRBC2*01

SEQ ID NO: 1393 - DNA, 537 bp, artificial sequence
  TRBC2*02
gaggacctgaaaaacgtgttcccacccgaggtcgctgtgtttgagccatcagaagcagagatctcccacacccaaaaggccacactggtatgcctggccacaggcttctaccccgaccacgtggagctgagctggtgggtgaatgggaaggaggtgcacagtggggtcagcacagacccgcagcccctcaaggagcagcccgccctcaatgactccagatactgcctgagcagccgcctgagggtctcggccaccttctggcagaacccccgcaaccacttccgctgtcaagtccagttctacgggctctcggagaatgacgagtggacccaggatagggccaaacccgtcacccagatcgtcagcgccgaggcctggggtagagcagactgtggcttcacctccgagtcttaccagcaaggggtcctgtctgccaccatcctctatgagatcttgctagggaaggccaccttgtatgccgtgctggtcagtgccctcgtgctgatggccatggtcaagagaaaggattccagaggc

SEQ ID NO: 1394 - DNA, 301 bp, artificial sequence
  TRGC1*02
gataaacaacttgatgcagatgtttcccccaagcccactatttttcttccttcgattgctgaaacaaaactccagaaggctggaacatacctttgtcttcttgagaaatttttcccagatattattaagatacattggcaagaaaagaagagcaacacgattctgggatcccaggaggggaacaccatgaagactaacgacacatacatgaaatttagctggttaacggtgccagaagagtcactggacaaagaacacagatgtatcgtcagacatgagaataataaaaacggaattgatc

SEQ ID NO: 1395 - DNA, 568 bp, artificial sequence
  TRGC2*01
gataaacaacttgatgcagatgtttcccccaagcccactatttttcttccttcaattgctgaaacaaaactccagaaggctggaacatacctttgtcttcttgagaaatttttcccagatattattaagatacattggcaagaaaagaagagcaacacgattctgggatcccaggaggggaacaccatgaagactaacgacacatacatgaaatttagctggttaacggtgccagaagagtcactggacaaagaacacagatgtatcgtcagacatgagaataataaaaacggaattgatcaagaaattatctttcctccaataaagacaggatgtcaccacagtggatcccaaagacagttattcaaaagatgcaaatgatgtcatcacaatggatcccaaagacaattggtcaaaagatgcaaatgatacactactgctgcagctcacaaacacctctgcatattacatgtacctcctcctgctcctcaagagtgtggtctattttgccatcatcacctgctgtctgcttggaagaacggctttctgctgcaatggagagaaatca

SEQ ID NO: 1396 - DNA, 567 bp, artificial sequence
  TRGC2*02
gataaacaacttgatgcagatgtttcccccaagcccactatttttcttccttcgattgctgaaacaaaactccagaaggctggaacatacctttgtcttcttgagaaatttttcccagatattattaagatacattggcaagaaaagaagagcaacacgattctgggatcccaggaggggaacaccatgaagactaacgacacatacatgaaatttagctggttaacggtgccagaagagtcactggacaaagaacacagatgtatcgtcagacatgagaataataaaaacggaattgatcaagaaattatctttcctccaataaagacagatgtcaccacagtggatcccaaatacaattattcaaaggatgcaaatgatgtcatcacaatggatcccaaagacaattggtcaaaagatgcaaatgatacactactgctgcagctcacaaacacctctgcatattacatgtacctcctcctgctcctcaagagtgtggtctattttgccatcatcacctgctgtctgcttggaagaacggctttctgctgcaatggagagaaatca

SEQ ID NO: 1397 - DNA, 567 bp, artificial sequence
  TRGC2*03
gataaacaacttgatgcagatgtttcccccaagcccactatttttcttccttcgattgctgaaacaaaactccagaaggctggaacatacctttgtcttcttgagaaatttttcccagatattattaagatacattggcaagaaaagaagagcaacacgattctgggatcccaggaggggaacaccatgaagactaacgacacatacatgaaatttagctggttaacggtgccagaagagtcactggacaaagaacacagatgtatcgtcagacatgagaataataaaaacggaattgatcaagaaattatctttcctccaataaagacagatgtcaccacagtggatcccaaatacaattattcaaaggatgcaaatgatgtcatcacaatggatcccaaagacaattggtcaaaagatgcaattgatacactactgctgcagctcacaaacacctctgcatattacatgtacctcctcctgctcctcaagagtggtgtctattttgccatcatcacctgctgtctgcttagaagaacggctttctgctgcaatggagagaaatca

SEQ ID NO: 1398 - DNA, 567 bp, artificial sequence
  TRGC2*04
gataaacaacttgatgcagatgtttcccccaagcccactatttttcttccttcaattgctgaaacaaaactccagaaggctggaacatacctttgtcttcttgagaaatttttcccagatattattaagatacattggcaagaaaagaagagcaacacgattctgggatcccaggaggggaacaccatgaagactaacgacacatacatgaaatttagctggttaacggtgccagaagagtcactggacaaagaacacagatgtatcgtcagacatgagaataataaaaacggaattgatcaagaaattatctttcctccaataaagacagatgtcaccacagtggatcccaaatacaattattcaaaggatgcaaatgatgtcatcacaatggatcccaaagacaattggtcaaaagatgcaattgatacactactgctgcagctcacaaacacctctgcatattacatgtacctcctcctgctcctcaagagtgtggtctattttgccatcatcacctgctgtctgcttggaagaacggctttctgctgcaatggagagaaatca

SEQ ID NO: 1399 - DNA, 615 bp, artificial sequence
  TRGC2*05
gataaacaacttgatgcagatgtttcccccaagcccactatttttcttccttcgattgctgaaacaaaactccagaaggctggaacatatctttgtcttcttgagaaatttttcccagatattattaagatacattggcaagaaaagaagagcaacacgattctgggatcccaggaggggaacaccatgaagactaacgacacatacatgaaatttagctggttaacggtgccagaagagtcactggacaaagaacacagatgtatcgtcagacatgagaataataaaaacggaattgatcaagaaattatctttcctccaataaagacagatgtcaccacagtggatcccaaagacagttattcaaaagatgcaaatgatgtcaccacagtggatcccaaatacaattattcaaaggatgcaaatgatgtcatcacaatggatcccaaagacaattggtcaaaagatgcaaatgatacactactgctgcagctcacaaacacctctgcatattacatgtacctcctcctgctcctcaagagtgtggtctattttgccatcatcacctgctgtctgcttggaagaacggctttctgctgcaatggagagaaatca

SEQ ID NO: 1400 - DNA, 1020 bp, artificial sequence
  IGHA2*01
gcatccccgaccagccccaaggtcttcccgctgagcctcgacagcaccccccaagatgggaacgtggtcgtcgcatgcctggtccagggcttcttcccccaggagccactcagtgtgacctggagcgaaagcggacagaacgtgaccgccagaaacttcccacctagccaggatgcctccggggacctgtacaccacgagcagccagctgaccctgccggccacacagtgcccagacggcaagtccgtgacatgccacgtgaagcactacacgaatcccagccaggatgtgactgtgccctgcccagttcccccacctcccccatgctgccacccccgactgtcgctgcaccgaccggccctcgaggacctgctcttaggttcagaagcgaacctcacgtgcacactgaccggcctgagagatgcctctggtgccaccttcacctggacgccctcaagtgggaagagcgctgttcaaggaccacctgagcgtgacctctgtggctgctacagcgtgtccagtgtcctgcctggctgtgcccagccatggaaccatggggagaccttcacctgcactgctgcccaccccgagttgaagaccccactaaccgccaacatcacaaaatccggaaacacattccggcccgaggtccacctgctgccgccgccgtcggaggagctggccctgaacgagctggtgacgctgacgtgcctggcacgtggcttcagccccaaggatgtgctggttcgctggctgcaggggtcacaggagctgccccgcgagaagtacctgacttgggcatcccggcaggagcccagccagggcaccaccaccttcgctgtgaccagcatactgcgcgtggcagccgaggactggaagaagggggacaccttctcctgcatggtgggccacgaggccctgccgctggccttcacacagaagaccatcgaccgcttggcgggtaaacccacccatgtcaatgtgtctgttgtcatggcggaggtggacggcacctgctac

SEQ ID NO: 1401 - DNA, 984 bp, artificial sequence
  IGHA2*02s
gcatccccgaccagccccaaggtcttcccgctgagcctcgacagcaccccccaagatgggaacgtggtcgtcgcatgcctggtccagggcttcttcccccaggagccactcagtgtgacctggagcgaaagcggacagaacgtgaccgccagaaacttcccacctagccaggatgcctccggggacctgtacaccacgagcagccagctgaccctgccggccacacagtgcccagacggcaagtccgtgacatgccacgtgaagcactacacgaattccagccaggatgtgactgtgccctgccgagttcccccacctcccccactcgaggacctgctcttaggttcagaagcgaacctcacgtgcacactgaccggcctgagagatgcctctggtgccaccttcacctggacgccctcaagtgggaagagcgctgttcaaggaccacctgagcgtgacctctgtggctgctacagcgtgtccagtgtcctgcctggctgtgcccagccatggaaccatggggagaccttcacctgcactgctgcccaccccgagttgaagaccccactaaccgccaacatcacaaaatccggaaacacattccggcccgaggtccacctgctgccgccgccgtcggaggagctggccctgaacgagctggtgacgctgacgtgcctggcacgtggcttcagccccaaggatgtgctggttcgctggctgcaggggtcacaggagctgccccgcgagaagtacctgacttgggcatcccggcaggagcccagccagggcaccaccacctacgctgtaaccagcatactgcgcgtggcagctgaggactggaagaagggggagaccttctcctgcatggtgggccacgaggccctgccgctggccttcacacagaagaccatcgaccgcatggcgggtaaacccacccacatcaatgtgtctgttgtcatggcggaggcggatggcacctgctac

SEQ ID NO: 1402 - DNA, 1173 bp, artificial sequence
  IGHA2*02
gcatccccgaccagccccaaggtcttcccgctgagcctcgacagcaccccccaagatgggaacgtggtcgtcgcatgcctggtccagggcttcttcccccaggagccactcagtgtgacctggagcgaaagcggacagaacgtgaccgccagaaacttcccacctagccaggatgcctccggggacctgtacaccacgagcagccagctgaccctgccggccacacagtgcccagacggcaagtccgtgacatgccacgtgaagcactacacgaattccagccaggatgtgactgtgccctgccgagttcccccacctcccccatgctgccacccccgactgtcgctgcaccgaccggccctcgaggacctgctcttaggttcagaagcgaacctcacgtgcacactgaccggcctgagagatgcctctggtgccaccttcacctggacgccctcaagtgggaagagcgctgttcaaggaccacctgagcgtgacctctgtggctgctacagcgtgtccagtgtcctgcctggctgtgcccagccatggaaccatggggagaccttcacctgcactgctgcccaccccgagttgaagaccccactaaccgccaacatcacaaaatccggaaacacattccggcccgaggtccacctgctgccgccgccgtcggaggagctggccctgaacgagctggtgacgctgacgtgcctggcacgtggcttcagccccaaggatgtgctggttcgctggctgcaggggtcacaggagctgccccgcgagaagtacctgacttgggcatcccggcaggagcccagccagggcaccaccacctacgctgtaaccagcatactgcgcgtggcagctgaggactggaagaagggggagaccttctcctgcatggtgggccacgaggccctgccgctggccttcacacagaagaccatcgaccgcatggcgggctcttgctgtgttgcagattggcagatgccgcctccctatgtggtgctggacttgccgcaggagaccctggaggaggagacccccggcgccaacctgtggcccaccaccatcaccttcctcaccctcttcctgctgagcctgttctatagcacagcactgaccgtgaccagcgtccggggcccatctggcaagagggagggcccccagtac

SEQ ID NO: 1403 - DNA, 1020 bp, artificial sequence
  IGHA2*03
gcatccccgaccagccccaaggtcttcccgctgagcctcgacagcaccccccaagatgggaacgtggtcgtcgcatgcctggtccagggcttcttcccccaggagccactcagtgtgacctggagcgaaagcggacagaacgtgaccgccagaaacttcccacctagccaggatgcctccggggacctgtacaccacgagcagccagctgaccctgccggccacacagtgcccagacggcaagtccgtgacatgccacgtgaagcactacacgaattccagccaggatgtgactgtgccctgccgagttcccccacctcccccatgctgccacccccgactgtcgctgcaccgaccggccctcgaggacctgctcttaggttcagaagcgaacctcacgtgcacactgaccggcctgagagatgcctctggtgccaccttcacctggacgccctcaagtgggaagagcgctgttcaaggaccacctgagcgtgacctctgtggctgctacagcgtgtccagtgtcctgcctggctgtgcccagccatggaaccatggggagaccttcacctgcactgctgcccaccccgagttgaagaccccactaaccgccaacatcacaaaatccggaaacacattccggcccgaggtccacctgctgccgccgccgtcggaggagctggccctgaacgagctggtgacgctgacgtgcctggcacgtggcttcagccccaaggatgtgctggttcgctggctgcaggggtcacaggagctgccccgcgagaagtacctgacttgggcatcccggcaggagcccagccagggcaccaccaccttcgctgtgaccagcatactgcgcgtggcagccgaggactggaagaagggggacaccttctcctgcatggtgggccacgaggccctgccgctggccttcacacagaagaccatcgaccgcttggcgggtaaacccacccatgtcaatgtgtctgttgtcatggcggaggtggacggcacctgctac

SEQ ID NO: 1404 - DNA, 1152 bp, artificial sequence
  IGHD*01
gcacccaccaaggctccggatgtgttccccatcatatcagggtgcagacacccaaaggataacagccctgtggtcctggcatgcttgataactgggtaccacccaacgtccgtgactgtcacctggtacatggggacacagagccagccccagagaaccttccctgagatacaaagacgggacagctactacatgacaagcagccagctctccacccccctccagcagtggcgccaaggcgagtacaaatgcgtggtccagcacaccgccagcaagagtaagaaggagatcttccgctggccagagtctccaaaggcacaggcctcctccgtgcccactgcacaaccccaagcagagggcagcctcgccaaggcaaccacagccccagccaccacccgtaacacaggaagaggaggagaagagaagaagaaggagaaggagaaagaggaacaagaagagagagagacaaagacaccagagtgtccgagccacacccagcctcttggcgtctacctgctaacccctgcagtgcaggacctgtggctccgggacaaagccaccttcacctgcttcgtggtgggcagtgacctgaaggatgctcacctgacctgggaggtggctgggaaggtccccacagggggcgtggaggaagggctgctggagcggcacagcaacggctcccagagccagcacagccgtctgaccctgcccaggtccttgtggaacgcggggacctccgtcacctgcacactgaaccatcccagcctcccaccccagaggttgatggcgctgagagaacccgctgcgcaggcacccgtcaagctttctctgaacctgctggcctcgtctgaccctcccgaggcggcctcgtggctcctgtgtgaggtgtctggcttctcgccccccaacatcctcctgatgtggctggaggaccagcgtgaggtgaacacttctgggtttgcccccgcacgcccccctccacagcccaggagcaccacgttctgggcctggagtgtgctgcgtgtcccagccccgcccagccctcagccagccacctacacgtgtgtggtcagccacgaggactcccggactctgctcaacgccagccggagcctagaagtcagctatgtaacagaccatggccccatgaaa

SEQ ID NO: 1405 - DNA, 1152 bp, artificial sequence
  IGHD*02
gcacccaccaaggctccggatgtgttccccatcatatcagggtgcagacacccaaaggataacagccctgtggtcctggcatgcttgataactgggtaccacccaacgtccgtgactgtcacctggtacatggggacacagagccagccccagagaaccttccctgagatacaaagacgggacagctactacatgacaagcagccagctctccacccccctccagcagtggcgccaaggcgagtacaaatgcgtggtccagcacaccgccagcaagagtaagaaggagatcttccgctggccagagtctccaaaggcacaggcctcctcagtgcccactgcacaaccccaagcagagggcagcctcgccaaggcaaccacagccccagccaccacccgtaacacaggaagaggaggagaagagaagaagaaggagaaggagaaagaggaacaagaagagagagagacaaagacaccagagtgtccgagccacacccagcctcttggcgtctacctgctaacccctgcagtgcaggacctgtggctccgggacaaagccaccttcacctgcttcgtggtgggcagtgacctgaaggatgctcacctgacctgggaggtggctgggaaggtccccacagggggcgtggaggaagggctgctggagcggcacagcaacggctcccagagccagcacagccgtctgaccctgcccaggtccttgtggaacgcggggacctccgtcacctgcacactgaaccatcccagcctcccaccccagaggttgatggcgctgagagaacccgctgcgcaggcacccgtcaagctttccctgaacctgctggcctcgtctgaccctcccgaggcggcctcgtggctcctgtgtgaggtgtctggcttctcgccccccaacatcctcctgatgtggctggaggaccagcgtgaggtgaacacttctgggtttgcccccgcacgcccccctccacagcccaggagcaccacgttctgggcctggagtgtgctgcgtgtcccagccccgcccagccctcagccagccacctacacgtgtgtggtcagccacgaggactcccggactctgctcaacgccagccggagcctagaagtcagctatgtaacagaccatggccccatgaaa

SEQ ID NO: 1406 - DNA, 1290 bp, artificial sequence
  IGHD*02
gcacccaccaaggctccggatgtgttccccatcatatcagggtgcagacacccaaaggataacagccctgtggtcctggcatgcttgataactgggtaccacccaacgtccgtgactgtcacctggtacatggggacacagagccagccccagagaaccttccctgagatacaaagacgggacagctactacatgacaagcagccagctctccacccccctccagcagtggcgccaaggcgagtacaaatgcgtggtccagcacaccgccagcaagagtaagaaggagatcttccgctggccagagtctccaaaggcacaggcctcctcagtgcccactgcacaaccccaagcagagggcagcctcgccaaggcaaccacagccccagccaccacccgtaacacaggaagaggaggagaagagaagaagaaggagaaggagaaagaggaacaagaagagagagagacaaagacaccagagtgtccgagccacacccagcctcttggcgtctacctgctaacccctgcagtgcaggacctgtggctccgggacaaagccaccttcacctgcttcgtggtgggcagtgacctgaaggatgctcacctgacctgggaggtggctgggaaggtccccacagggggcgtggaggaagggctgctggagcggcacagcaacggctcccagagccagcacagccgtctgaccctgcccaggtccttgtggaacgcggggacctccgtcacctgcacactgaaccatcccagcctcccaccccagaggttgatggcgctgagagaacccgctgcgcaggcacccgtcaagctttccctgaacctgctggcctcgtctgaccctcccgaggcggcctcgtggctcctgtgtgaggtgtctggcttctcgccccccaacatcctcctgatgtggctggaggaccagcgtgaggtgaacacttctgggtttgcccccgcacgcccccctccacagcccaggagcaccacgttctgggcctggagtgtgctgcgtgtcccagccccgcccagccctcagccagccacctacacgtgtgtggtcagccacgaggactcccggactctgctcaacgccagccggagcctagaagtcagctacctggccatgacccccctgatccctcagagcaaggatgagaacagcgatgactacacgacctttgatgatgtgggcagcctgtggaccaccctgtccacgtttgtggccctcttcatcctcaccctcctctacagcggcattgtcactttcatcaaggtgaag

SEQ ID NO: 1407 - DNA, 1482 bp, artificial sequence
  IGHE*01
gcctccacacagagcccatccgtcttccccttgacccgctgctgcaaaaacattccctccaatgccacctccgtgactctgggctgcctggccacgggctacttcccggagccggtgatggtgacctgcgacacaggctccctcaacgggacaactatgaccttaccagccaccaccctcacgctctctggtcactatgccaccatcagcttgctgaccgtctcgggtgcgtgggccaagcagatgttcacctgccgtgtggcacacactccatcgtccacagactgggtcgacaacaaaaccttcagcgtctgctccagggacttcaccccgcccaccgtgaagatcttacagtcgtcctgcgacggcggcgggcacttccccccgaccatccagctcctgtgcctcgtctctgggtacaccccagggactatcaacatcacctggctggaggacgggcaggtcatggacgtggacttgtccaccgcctctaccacgcaggagggtgagctggcctccacacaaagcgagctcaccctcagccagaagcactggctgtcagaccgcacctacacctgccaggtcacctatcaaggtcacacctttgaggacagcaccaagaagtgtgcagattccaacccgagaggggtgagcgcctacctaagccggcccagcccgttcgacctgttcatccgcaagtcgcccacgatcacctgtctggtggtggacctggcacccagcaaggggaccgtgaacctgacctggtcccgggccagtgggaagcctgtgaaccactccaccagaaaggaggagaagcagcgcaatggcacgttaaccgtcacgtccaccctgccggtgggcacccgagactggatcgagggggagacctaccagtgcagggtgacccacccccacctgcccagggccctcatgcggtccacgaccaagaccagcggcccgcgtgctgccccggaagtctatgcgtttgcgacgccggagtggccggggagccgggacaagcgcaccctcgcctgcctgatccagaacttcatgcctgaggacatctcggtgcagtggctgcacaacgaggtgcagctcccggacgcccggcacagcacgacgcagccccgcaagaccaagggctccggcttcttcgtcttcagccgcctggaggtgaccagggccgaatgggagcagaaagatgagttcatctgccgtgcagtccatgaggcagcgagcccctcacagaccgtccagcgagcggtgtctgtaaatcccgagctggacgtgtgcgtggaggaggccgagggcgaggcgccgtggacgtggaccggcctctgcatcttcgccgcactcttcctgctcagcgtgagctacagcgccgccctcacgctcctcatggtgcagcggttcctctcagccacgcggcaggggaggccccagacctccctcgactacaccaacgtcctccagccccacgcc

SEQ ID NO: 1408 - DNA, 1284 bp, artificial sequence
  IGHE*02
gcctccacacagagcccatccgtcttccccttgacccgctgctgcaaaaacattccctccaatgccacctccgtgactctgggctgcctggccacgggctacttcccggagccggtgatggtgacctgggacacaggctccctcaacgggacaactatgaccttaccagccaccaccctcacgctctctggtcactatgccaccatcagcttgctgaccgtctcgggtgcgtgggccaagcagatgttcacctgccgtgtggcacacactccatcgtccacagactgggtcgacaacaaaaccttcagcgtctgctccagggacttcaccccgcccaccgtgaagatcttacagtcgtcctgcgacggcggcgggcacttccccccgaccatccagctcctgtgcctcgtctctgggtacaccccagggactatcaacatcacctggctggaggacgggcaggtcatggacgtggacttgtccaccgcctctaccacgcaggagggtgagctggcctccacacaaagcgagctcaccctcagccagaagcactggctgtcagaccgcacctacacctgccaggtcacctatcaaggtcacacctttgaggacagcaccaagaagtgtgcagattccaacccgagaggggtgagcgcctacctaagccggcccagcccgttcgacctgttcatccgcaagtcgcccacgatcacctgtctggtggtggacctggcacccagcaaggggaccgtgaacctgacctggtcccgggccagtgggaagcctgtgaaccactccaccagaaaggaggagaagcagcgcaatggcacgttaaccgtcacgtccaccctgccggtgggcacccgagactggatcgagggggagacctaccagtgcagggtgacccacccccacctgcccagggccctcatgcggtccacgaccaagaccagcggcccgcgtgctgccccggaagtctatgcgtttgcgacgccggagtggccggggagccgggacaagcgcaccctcgcctgcctgatccagaacttcatgcctgaggacatctcggtgcagtggctgcacaacgaggtgcagctcccggacgcccggcacagcacgacgcagccccgcaagaccaagggctccggcttcttcgtcttcagccgcctggaggtgaccagggccgaatgggagcagaaagatgagttcatctgccgtgcagtccatgaggcagcgagcccctcacagaccgtccagcgagcggtgtctgtaaatcccggtaaa

SEQ ID NO: 1409 - DNA, 204 bp, artificial sequence
  IGHE*03
gagctggacgtgtgcgtggaggaggccgagggcgaggcgccgtggacgtggaccggcctctgcatcttcgccgcactcttcctgctcagcgtgagctacagcgccgccctcacgctcctcatggtgcagcggttcctctcagccacgcggcaggggaggccccagacctccctcgactacaccaacgtcctccagccccacgcc

SEQ ID NO: 1410 - DNA, 1284 bp, artificial sequence
  IGHE*04
gcctccacacagagcccatccgtcttccccttgacccgctgctgcaaaaacattccctccaatgccacctccgtgactctgggctgcctggccacgggctacttcccggagccggtgatggtgacctgggacacaggctccctcaacgggacaactatgaccttaccagccaccaccctcacgctctctggtcactatgccaccatcagcttgctgaccgtctcgggtgcgtgggccaagcagatgttcacctgccgtgtggcacacactccatcgtccacagactgggtcgacaacaaaaccttcagcgtctgctccagggacttcaccccgcccaccgtgaagatcttacagtcgtcctgcgacggcggcgggcacttccccccgaccatccagctcctgtgcctcgtctctgggtacaccccagggactatcaacatcacctggctggaggacgggcaggtcatggacgtggacttgtccaccgcctctaccacgcaggagggtgagctggcctccacacaaagcgagctcaccctcagccagaagcactggctgtcagaccgcacctacacctgccaggtcacctatcaaggtcacacctttgaggacagcaccaagaagtgtgcagattccaacccgagaggggtgagcgcctacctaagccggcccagcccgttcgacctgttcatccgcaagtcgcccacgatcacctgtctggtggtggacctggcacccagcaaggggaccgtgaacctgacctggtcccgggccagtgggaagcctgtgaaccactccaccagaaaggaggagaagcagcgcaatggcacgttaaccgtcacgtccaccctgccggtgggcacccgagactggatcgagggggagacctaccagtgcagggtgacccacccccacctgcccagggccctcatgcggtccacgaccaagaccagcggcccgcgtgctgccccggaagtctatgcgtttgcgacgccggagtggccggggagccgggacaagcgcaccctcgcctgcctgatccagaacttcatgcctgaggacatctcggtgcagtggctgcacaacgaggtgcagctcccggacgcccggcacagcacgacgcagccccgcaagaccaagggctccggcttcttcgtcttcagccgcctggaggtgaccagggccgaatgggagcagaaagatgagttcatctgccgtgcagtccatgaggcagcaagcccctcacagaccgtccagcgagcggtgtctgtaaatcccggtaaa

SEQ ID NO: 1411 - DNA, 1482 bp, artificial sequence
  IGHE*04
gcctccacacagagcccatccgtcttccccttgacccgctgctgcaaaaacattccctccaatgccacctccgtgactctgggctgcctggccacgggctacttcccggagccggtgatggtgacctgggacacaggctccctcaacgggacaactatgaccttaccagccaccaccctcacgctctctggtcactatgccaccatcagcttgctgaccgtctcgggtgcgtgggccaagcagatgttcacctgccgtgtggcacacactccatcgtccacagactgggtcgacaacaaaaccttcagcgtctgctccagggacttcaccccgcccaccgtgaagatcttacagtcgtcctgcgacggcggcgggcacttccccccgaccatccagctcctgtgcctcgtctctgggtacaccccagggactatcaacatcacctggctggaggacgggcaggtcatggacgtggacttgtccaccgcctctaccacgcaggagggtgagctggcctccacacaaagcgagctcaccctcagccagaagcactggctgtcagaccgcacctacacctgccaggtcacctatcaaggtcacacctttgaggacagcaccaagaagtgtgcagattccaacccgagaggggtgagcgcctacctaagccggcccagcccgttcgacctgttcatccgcaagtcgcccacgatcacctgtctggtggtggacctggcacccagcaaggggaccgtgaacctgacctggtcccgggccagtgggaagcctgtgaaccactccaccagaaaggaggagaagcagcgcaatggcacgttaaccgtcacgtccaccctgccggtgggcacccgagactggatcgagggggagacctaccagtgcagggtgacccacccccacctgcccagggccctcatgcggtccacgaccaagaccagcggcccgcgtgctgccccggaagtctatgcgtttgcgacgccggagtggccggggagccgggacaagcgcaccctcgcctgcctgatccagaacttcatgcctgaggacatctcggtgcagtggctgcacaacgaggtgcagctcccggacgcccggcacagcacgacgcagccccgcaagaccaagggctccggcttcttcgtcttcagccgcctggaggtgaccagggccgaatgggagcagaaagatgagttcatctgccgtgcagtccatgaggcagcaagcccctcacagaccgtccagcgagcggtgtctgtaaatcccgagctggacgtgtgcgtggaggaggccgagggcgaggcgccgtggacgtggaccggcctctgcatcttcgccgcactcttcctgctcagcgtgagctacagcgccgccatcacgctcctcatggtgcagcggttcctctcagccacgcggcaggggaggccccagacctccctcgactacaccaacgtcctccagccccacgcc

SEQ ID NO: 1412 - DNA, 990 bp, artificial sequence
  IGHG1*02
gcctccaccaagggcccatcggtcttccccctggcaccctcctccaagagcacctctgggggcacagcggccctgggctgcctggtcaaggactacttccccgaaccggtgacggtgtcgtggaactcaggcgccctgaccagcggcgtgcacaccttcccggctgtcctacagtcctcaggactctactccctcagcagcgtggtgaccgtgccctccagcagcttgggcacccagacctacatctgcaacgtgaatcacaagcccagcaacaccaaggtggacaagaaagttgagcccaaatcttgtgacaaaactcacacatgcccaccgtgcccagcacctgaactcctggggggaccgtcagtcttcctcttccccccaaaacccaaggacaccctcatgatctcccggacccctgaggtcacatgcgtggtggtggacgtgagccacgaagaccctgaggtcaagttcaactggtacgtggacggcgtggaggtgcataatgccaagacaaagccgcgggaggagcagtacaacagcacgtaccgtgtggtcagcgtcctcaccgtcctgcaccaggactggctgaatggcaaggagtacaagtgcaaggtctccaacaaagccctcccagcccccatcgagaaaaccatctccaaagccaaagggcagccccgagaaccacaggtgtacaccctgcccccatcccgggatgagctgaccaagaaccaggtcagcctgacctgcctggtcaaaggcttctatcccagcgacatcgccgtggagtgggagagcaatgggcagccggagaacaactacaagaccacgcctcccgtgctggactccgacggctccttcttcctctacagcaagctcaccgtggacaagagcaggtggcagcaggggaacgtcttctcatgctccgtgatgcatgaggctctgcacaaccactacacgcagaagagcctctccctgtctccgggtaaa

SEQ ID NO: 1413 - DNA, 990 bp, artificial sequence
  IGHG1*03
gcctccaccaagggcccatcggtcttccccctggcaccctcctccaagagcacctctgggggcacagcggccctgggctgcctggtcaaggactacttccccgaaccggtgacggtgtcgtggaactcaggcgccctgaccagcggcgtgcacaccttcccggctgtcctacagtcctcaggactctactccctcagcagcgtggtgaccgtgccctccagcagcttgggcacccagacctacatctgcaacgtgaatcacaagcccagcaacaccaaggtggacaagagagttgagcccaaatcttgtgacaaaactcacacatgcccaccgtgcccagcacctgaactcctggggggaccgtcagtcttcctcttccccccaaaacccaaggacaccctcatgatctcccggacccctgaggtcacatgcgtggtggtggacgtgagccacgaagaccctgaggtcaagttcaactggtacgtggacggcgtggaggtgcataatgccaagacaaagccgcgggaggagcagtacaacagcacgtaccgtgtggtcagcgtcctcaccgtcctgcaccaggactggctgaatggcaaggagtacaagtgcaaggtctccaacaaagccctcccagcccccatcgagaaaaccatctccaaagccaaagggcagccccgagaaccacaggtgtacaccctgcccccatcccgggaggagatgaccaagaaccaggtcagcctgacctgcctggtcaaaggcttctatcccagcgacatcgccgtggagtgggagagcaatgggcagccggagaacaactacaagaccacgcctcccgtgctggactccgacggctccttcttcctctatagcaagctcaccgtggacaagagcaggtggcagcaggggaacgtcttctcatgctccgtgatgcatgaggctctgcacaaccactacacgcagaagagcctctccctgtccccgggtaaa

SEQ ID NO: 1414 - DNA, 978 bp, artificial sequence
  |IGHG2*0
gcctccaccaagggcccatcggtcttccccctggcgccctgctccaggagcacctccgagagcacagccgccctgggctgcctggtcaaggactacttccccgaaccggtgacggtgtcgtggaactcaggcgctctgaccagcggcgtgcacaccttcccagctgtcctacagtcctcaggactctactccctcagcagcgtggtgaccgtgccctccagcaacttcggcacccagacctacacctgcaacgtagatcacaagcccagcaacaccaaggtggacaagacagttgagcgcaaatgttgtgtcgagtgcccaccgtgcccagcaccacctgtggcaggaccgtcagtcttcctcttccccccaaaacccaaggacaccctcatgatctcccggacccctgaggtcacgtgcgtggtggtggacgtgagccacgaagaccccgaggtccagttcaactggtacgtggacggcgtggaggtgcataatgccaagacaaagccacgggaggagcagttcaacagcacgttccgtgtggtcagcgtcctcaccgttgtgcaccaggactggctgaacggcaaggagtacaagtgcaaggtctccaacaaaggcctcccagcccccatcgagaaaaccatctccaaaaccaaagggcagccccgagaaccacaggtgtacaccctgcccccatcccgggaggagatgaccaagaaccaggtcagcctgacctgcctggtcaaaggcttctaccccagcgacatcgccgtggagtgggagagcaatgggcagccggagaacaactacaagaccacacctcccatgctggactccgacggctccttcttcctctacagcaagctcaccgtggacaagagcaggtggcagcaggggaacgtcttctcatgctccgtgatgcatgaggctctgcacaaccactacacgcagaagagcctctccctgtctccgggtaaa

SEQ ID NO: 1415 - DNA, 1185 bp, artificial sequence
  IGHG2*01
gcctccaccaagggcccatcggtcttccccctggcgccctgctccaggagcacctccgagagcacagccgccctgggctgcctggtcaaggactacttccccgaaccggtgacggtgtcgtggaactcaggcgctctgaccagcggcgtgcacaccttcccagctgtcctacagtcctcaggactctactccctcagcagcgtggtgaccgtgccctccagcaacttcggcacccagacctacacctgcaacgtagatcacaagcccagcaacaccaaggtggacaagacagttgagcgcaaatgttgtgtcgagtgcccaccgtgcccagcaccacctgtggcaggaccgtcagtcttcctcttccccccaaaacccaaggacaccctcatgatctcccggacccctgaggtcacgtgcgtggtggtggacgtgagccacgaagaccccgaggtccagttcaactggtacgtggacggcgtggaggtgcataatgccaagacaaagccacgggaggagcagttcaacagcacgttccgtgtggtcagcgtcctcaccgttgtgcaccaggactggctgaacggcaaggagtacaagtgcaaggtctccaacaaaggcctcccagcccccatcgagaaaaccatctccaaaaccaaagggcagccccgagaaccacaggtgtacaccctgcccccatcccgggaggagatgaccaagaaccaggtcagcctgacctgcctggtcaaaggcttctaccccagcgacatcgccgtggagtgggagagcaatgggcagccggagaacaactacaagaccacacctcccatgctggactccgacggctccttcttcctctacagcaagctcaccgtggacaagagcaggtggcagcaggggaacgtcttctcatgctccgtgatgcatgaggctctgcacaaccactacacgcagaagagcctctccctgtctccggagctgcaactggaggagagctgtgcggaggcgcaggacggggagctggacgggctgtggacgaccatcaccatcttcatcacactcttcctgctaagcgtgtgctacagtgccaccatcaccttcttcaaggtgaagtggatcttctcctcagtggtggacctgaagcagaccatcgtccccgactacaggaacatgatcaggcagggggcc

SEQ ID NO: 1416 - DNA, 978 bp, artificial sequence
  IGHG2*02
gcctccaccaagggcccatcggtcttccccctggcgccctgctccaggagcacctccgagagcacagcggccctgggctgcctggtcaaggactacttccccgaaccggtgacggtgtcgtggaactcaggcgctctgaccagcggcgtgcacaccttcccggctgtcctacagtcctcaggactctactccctcagcagcgtggtgaccgtgacctccagcaacttcggcacccagacctacacctgcaacgtagatcacaagcccagcaacaccaaggtggacaagacagttgagcgcaaatgttgtgtcgagtgcccaccgtgcccagcaccacctgtggcaggaccgtcagtcttcctcttccccccaaaacccaaggacaccctcatgatctcccggacccctgaggtcacgtgcgtggtggtggacgtgagccacgaagaccccgaggtccagttcaactggtacgtggacggcatggaggtgcataatgccaagacaaagccacgggaggagcagttcaacagcacgttccgtgtggtcagcgtcctcaccgtcgtgcaccaggactggctgaacggcaaggagtacaagtgcaaggtctccaacaaaggcctcccagcccccatcgagaaaaccatctccaaaaccaaagggcagccccgagaaccacaggtgtacaccctgcccccatcccgggaggagatgaccaagaaccaggtcagcctgacctgcctggtcaaaggcttctaccccagcgacatcgccgtggagtgggagagcaatgggcagccggagaacaactacaagaccacacctcccatgctggactccgacggctccttcttcctctacagcaagctcaccgtggacaagagcaggtggcagcaggggaacgtcttctcatgctccgtgatgcatgaggctctgcacaaccactacacacagaagagcctctccctgtctccgggtaaa

SEQ ID NO: 1417 - DNA, 978 bp, artificial sequence
  IGHG2*03
gcctccaccaagggcccatcggtcttccccctggcgccctgctccaggagcacctccgagagcacagcggccctgggctgcctggtcaaggactacttccccgaaccggtgacggtgtcgtggaactcaggcgctctgaccagcggcgtgcacaccttcccagctgtcctacagtcctcaggactctactccctcagcagcgtggtgaccgtgccctccagcaacttcggcacccagacctacacctgcaacgtagatcacaagcccagcaacaccaaggtggacaagacagttgagcgcaaatgttgtgtcgagtgcccaccgtgcccagcaccacctgtggcaggaccgtcagtcttcctcttccccccaaaacccaaggacaccctcatgatctcccggacccctgaggtcacgtgcgtggtggtggacgtgagccacgaagaccccgaggtccagttcaactggtacgtggacggcgtggaggtgcataatgccaagacaaagccacgggaggagcagttcaacagcacgttccgtgtggtcagcgtcctcaccgttgtgcaccaggactggctgaacggcaaggagtacaagtgcaaggtctccaacaaaggcctcccagcccccatcgagaaaaccatctccaaaaccaaagggcagccccgagaaccacaggtgtacaccctgcccccatcccgggaggagatgaccaagaaccaggtcagcctgacctgcctggtcaaaggcttctaccccagcgacatcgccgtggagtgggagagcaatgggcagccggagaacaactacaagaccacacctcccatgctggactccgacggctccttcttcctctacagcaagctcaccgtggacaagagcaggtggcagcaggggaacgtcttctcatgctccgtgatgcatgaggctctgcacaaccactacacgcagaagagcctctccctgtctccgggtaaa

SEQ ID NO: 1418 - DNA, 978 bp, artificial sequence
  IGHG2*04
gcctccaccaagggcccatcggtcttccccctggcgccctgctccaggagcacctccgagagcacagcggccctgggctgcctggtcaaggactacttccccgaaccggtgacggtgtcgtggaactcaggcgctctgaccagcggcgtgcacaccttcccagctgtcctacagtcctcaggactctactccctcagcagcgtggtgaccgtgccctccagcagcttgggcacccagacctacacctgcaacgtagatcacaagcccagcaacaccaaggtggacaagacagttgagcgcaaatgttgtgtcgagtgcccaccgtgcccagcaccacctgtggcaggaccgtcagtcttcctcttccccccaaaacccaaggacaccctcatgatctcccggacccctgaggtcacgtgcgtggtggtggacgtgagccacgaagaccccgaggtccagttcaactggtacgtggacggcgtggaggtgcataatgccaagacaaagccacgggaggagcagttcaacagcacgttccgtgtggtcagcgtcctcaccgttgtgcaccaggactggctgaacggcaaggagtacaagtgcaaggtctccaacaaaggcctcccagcccccatcgagaaaaccatctccaaaaccaaagggcagccccgagaaccacaggtgtacaccctgcccccatcccgggaggagatgaccaagaaccaggtcagcctgacctgcctggtcaaaggcttctaccccagcgacatcgccgtggagtgggagagcaatgggcagccggagaacaactacaagaccacacctcccatgctggactccgacggctccttcttcctctacagcaagctcaccgtggacaagagcaggtggcagcaggggaacgtcttctcatgctccgtgatgcatgaggctctgcacaaccactacacgcagaagagcctctccctgtctccgggtaaa

SEQ ID NO: 1419 - DNA, 978 bp, artificial sequence
  IGHG2*05
gcctccaccaagggcccatcggtcttccccctggcgccctgctccaggagcacctccgagagcacagcggccctgggctgcctggtcaaggactacttccccgaaccggtgacggtgtcgtggaactcaggcgctctgaccagcggcgtgcacaccttcccagctgtcctacagtcctcaggactctactccctcagcagcgtggtgaccgtgccctccagcaacttcggcacccagacctacacctgcaacgtagatcacaagcccagcaacaccaaggtggacaagacagttgagcgcaaatgttgtgtcgagtgcccaccgtgcccagcaccacctgtggcaggaccgtcagtcttcctcttccccccaaaacccaaggacaccctcatgatctcccggacccctgaggtcacgtgcgtggtggtggacgtgagccacgaagaccccgaggtccagttcaactggtacgtggacggcgtggaggtgcataatgccaagacaaagccacgggaggagcagttcaacagcacgttccgtgtggtcagcgtcctcaccgttgtgcaccaggactggctgaacggcaaggagtacaagtgcaaggtctccaacaaaggcctcccagcccccatcgagaaaaccatctccaaaaccaaagggcagccccgagaaccacaggtgtacaccctgcccccatcccgggaggagatgaccaagaaccaggtcagcctgacctgcctggtcaaaggcttctaccccagcgacatcgccgtggagtgggagagcaatgggcagccggagaacaactacaagaccacgcctcccatgctggactccgacggctccttcttcctctacagcaagctcaccgtggacaagagcaggtggcagcaggggaacgtcttctcatgctccgtgatgcatgaggctctgcacaaccactacacgcagaagagcctctccctgtctccgggtaaa

SEQ ID NO: 1420 - DNA, 978 bp, artificial sequence
  IGHG2*06
gcctccaccaagggcccatcggtcttccccctggcgccctgctccaggagcacctccgagagcacagcggccctgggctgcctggtcaaggactacttccccgaaccggtgacggtgtcgtggaactcaggcgctctgaccagcggcgtgcacaccttcccggctgtcctacagtcctcaggactctactccctcagcagcgtggtgaccgtgccctccagcaacttcggcacccagacctacacctgcaacgtagatcacaagcccagcaacaccaaggtggacaagacagttgagcgcaaatgttgtgtcgagtgcccaccgtgcccagcaccacctgtggcaggaccgtcagtcttcctcttccccccaaaacccaaggacaccctcatgatctcccggacccctgaggtcacgtgcgtggtggtggacgtgagccacgaagaccccgaggtccagttcaactggtacgtggacggcgtggaggtgcataatgccaagacaaagccacgggaggagcagttcaacagcacgttccgtgtggtcagcgtcctcaccgtcgtgcaccaggactggctgaacggcaaggagtacaagtgcaaggtctccaacaaaggcctcccagcccccatcgagaaaaccatctccaaaaccaaagggcagccccgagaaccacaggtgtacaccctgcccccatcccgggaggagatgaccaagaaccaggtcagcctgacctgcctggtcaaaggcttctaccccagcgacatctccgtggagtgggagagcaatgggcagccggagaacaactacaagaccacacctcccatgctggactccgacggctccttcttcctctacagcaagctcaccgtggacaagagcaggtggcagcaggggaacgtcttctcatgctccgtgatgcatgaggctctgcacaaccactacacacagaagagcctctccctgtctccgggtaaa

SEQ ID NO: 1421 - DNA, 1185 bp, artificial sequence
  IGHG2*06
gcctccaccaagggcccatcggtcttccccctggcgccctgctccaggagcacctccgagagcacagcggccctgggctgcctggtcaaggactacttccccgaaccggtgacggtgtcgtggaactcaggcgctctgaccagcggcgtgcacaccttcccggctgtcctacagtcctcaggactctactccctcagcagcgtggtgaccgtgccctccagcaacttcggcacccagacctacacctgcaacgtagatcacaagcccagcaacaccaaggtggacaagacagttgagcgcaaatgttgtgtcgagtgcccaccgtgcccagcaccacctgtggcaggaccgtcagtcttcctcttccccccaaaacccaaggacaccctcatgatctcccggacccctgaggtcacgtgcgtggtggtggacgtgagccacgaagaccccgaggtccagttcaactggtacgtggacggcgtggaggtgcataatgccaagacaaagccacgggaggagcagttcaacagcacgttccgtgtggtcagcgtcctcaccgtcgtgcaccaggactggctgaacggcaaggagtacaagtgcaaggtctccaacaaaggcctcccagcccccatcgagaaaaccatctccaaaaccaaagggcagccccgagaaccacaggtgtacaccctgcccccatcccgggaggagatgaccaagaaccaggtcagcctgacctgcctggtcaaaggcttctaccccagcgacatctccgtggagtgggagagcaatgggcagccggagaacaactacaagaccacacctcccatgctggactccgacggctccttcttcctctacagcaagctcaccgtggacaagagcaggtggcagcaggggaacgtcttctcatgctccgtgatgcatgaggctctgcacaaccactacacacagaagagcctctccctgtctccggagctgcaactggaggagagctgtgcggaggcgcaggacggggagctggacgggctgtggaccaccatcaccatcttcatcacactcttcctgctaagcgtgtgctacagtgccaccatcaccttcttcaaggtgaagtggatcttctcctcagtggtggacctgaagcagaccatcgtccccgactacaggaacatgatcaggcagggggcc

SEQ ID NO: 1422 - DNA, 1131 bp, artificial sequence
  IGHG3*01
gcttccaccaagggcccatcggtcttccccctggcgccctgctccaggagcacctctgggggcacagcggccctgggctgcctggtcaaggactacttccccgaaccggtgacggtgtcgtggaactcaggcgccctgaccagcggcgtgcacaccttcccggctgtcctacagtcctcaggactctactccctcagcagcgtggtgaccgtgccctccagcagcttgggcacccagacctacacctgcaacgtgaatcacaagcccagcaacaccaaggtggacaagagagttgagctcaaaaccccacttggtgacacaactcacacatgcccacggtgcccagagcccaaatcttgtgacacacctcccccgtgcccacggtgcccagagcccaaatcttgtgacacacctcccccatgcccacggtgcccagagcccaaatcttgtgacacacctcccccgtgcccaaggtgcccagcacctgaactcctgggaggaccgtcagtcttcctcttccccccaaaacccaaggatacccttatgatttcccggacccctgaggtcacgtgcgtggtggtggacgtgagccacgaagaccccgaggtccagttcaagtggtacgtggacggcgtggaggtgcataatgccaagacaaagccgcgggaggagcagtacaacagcacgttccgtgtggtcagcgtcctcaccgtcctgcaccaggactggctgaacggcaaggagtacaagtgcaaggtctccaacaaagccctcccagcccccatcgagaaaaccatctccaaaaccaaaggacagccccgagaaccacaggtgtacaccctgcccccatcccgggaggagatgaccaagaaccaggtcagcctgacctgcctggtcaaaggcttctaccccagcgacatcgccgtggagtgggagagcagcgggcagccggagaacaactacaacaccacgcctcccatgctggactccgacggctccttcttcctctacagcaagctcaccgtggacaagagcaggtggcagcaggggaacatcttctcatgctccgtgatgcatgaggctctgcacaaccgcttcacgcagaagagcctctccctgtctccgggtaaa

SEQ ID NO: 1423 - DNA, 1338 bp, artificial sequence
  IGHG3*01
gcttccaccaagggcccatcggtcttccccctggcgccctgctccaggagcacctctgggggcacagcggccctgggctgcctggtcaaggactacttccccgaaccggtgacggtgtcgtggaactcaggcgccctgaccagcggcgtgcacaccttcccggctgtcctacagtcctcaggactctactccctcagcagcgtggtgaccgtgccctccagcagcttgggcacccagacctacacctgcaacgtgaatcacaagcccagcaacaccaaggtggacaagagagttgagctcaaaaccccacttggtgacacaactcacacatgcccacggtgcccagagcccaaatcttgtgacacacctcccccgtgcccacggtgcccagagcccaaatcttgtgacacacctcccccatgcccacggtgcccagagcccaaatcttgtgacacacctcccccgtgcccaaggtgcccagcacctgaactcctgggaggaccgtcagtcttcctcttccccccaaaacccaaggatacccttatgatttcccggacccctgaggtcacgtgcgtggtggtggacgtgagccacgaagaccccgaggtccagttcaagtggtacgtggacggcgtggaggtgcataatgccaagacaaagccgcgggaggagcagtacaacagcacgttccgtgtggtcagcgtcctcaccgtcctgcaccaggactggctgaacggcaaggagtacaagtgcaaggtctccaacaaagccctcccagcccccatcgagaaaaccatctccaaaaccaaaggacagccccgagaaccacaggtgtacaccctgcccccatcccgggaggagatgaccaagaaccaggtcagcctgacctgcctggtcaaaggcttctaccccagcgacatcgccgtggagtgggagagcagcgggcagccggagaacaactacaacaccacgcctcccatgctggactccgacggctccttcttcctctacagcaagctcaccgtggacaagagcaggtggcagcaggggaacatcttctcatgctccgtgatgcatgaggctctgcacaaccgcttcacgcagaagagcctctccctgtctccggagctgcaactggaggagagctgtgcggaggcgcaggacggggagctggacgggctgtggacgaccatcaccatcttcatcacactcttcctgttaagcgtgtgctacagtgccaccgtcaccttcttcaaggtgaagtggatcttctcctcggtggtggacctgaagcagaccatcatccccgactataggaacatgattgggcagggggcc

SEQ ID NO: 1424 - DNA, 1086 bp, artificial sequence
  IGHG3*03
gcttccaccaagggcccatcggtcttccccctggcgccctgctccaggagcacctctgggggcacagcggccctgggctgcctggtcaaggactacttccccgaaccggtgacggtgtcgtggaactcaggcgccctgaccagcggcgtgcacaccttcccggctgtcctacagtcctcaggactctactccctcagcagcgtggtgaccgtgccctccagcagcttgggcacccagacctacacctgcaacgtgaatcacaagcccagcaacaccaaggtggacaagagagttgagctcaaaaccccacttggtgacacaactcacacatgcccacggtgcccagagcccaaatcttgtgacacacctcccccatgcccacggtgcccagagcccaaatcttgtgacacacctcccccgtgcccaaggtgcccagcacctgaactcctgggaggaccgtcagtcttcctcttccccccaaaacccaaggatacccttatgatttcccggacccctgaggtcacgtgcgtggtggtggacgtgagccacgaagaccccgaggtccagttcaagtggtacgtggacggcgtggaggtgcataatgccaagacaaagccgcgggaggagcagtacaacagcacgttccgtgtggtcagcgtcctcaccgtcctgcaccaggactggctgaacggcaaggagtacaagtgcaaggtctccaacaaagccctcccagcccccatcgagaaaaccatctccaaaaccaaaggacagccccgagaaccacaggtgtacaccctgcccccatcccgggaggagatgaccaagaaccaggtcagcctgacctgcctggtcaaaggcttctaccccagcgacatcgccgtggagtgggagagcagcgggcagccggagaacaactacaacaccacgcctcccgtgctggactccgacggctccttcttcctctacagcaggctaaccgtggacaagagcaggtggcaggaggggaatgtcttctcatgctccgtgatgcatgaggctctgcacaaccgcttcacgcagaagagcctctccctgtctccgggtaaa

SEQ ID NO: 1425 - DNA, 1293 bp, artificial sequence
  IGHG3*03
gcttccaccaagggcccatcggtcttccccctggcgccctgctccaggagcacctctgggggcacagcggccctgggctgcctggtcaaggactacttccccgaaccggtgacggtgtcgtggaactcaggcgccctgaccagcggcgtgcacaccttcccggctgtcctacagtcctcaggactctactccctcagcagcgtggtgaccgtgccctccagcagcttgggcacccagacctacacctgcaacgtgaatcacaagcccagcaacaccaaggtggacaagagagttgagctcaaaaccccacttggtgacacaactcacacatgcccacggtgcccagagcccaaatcttgtgacacacctcccccatgcccacggtgcccagagcccaaatcttgtgacacacctcccccgtgcccaaggtgcccagcacctgaactcctgggaggaccgtcagtcttcctcttccccccaaaacccaaggatacccttatgatttcccggacccctgaggtcacgtgcgtggtggtggacgtgagccacgaagaccccgaggtccagttcaagtggtacgtggacggcgtggaggtgcataatgccaagacaaagccgcgggaggagcagtacaacagcacgttccgtgtggtcagcgtcctcaccgtcctgcaccaggactggctgaacggcaaggagtacaagtgcaaggtctccaacaaagccctcccagcccccatcgagaaaaccatctccaaaaccaaaggacagccccgagaaccacaggtgtacaccctgcccccatcccgggaggagatgaccaagaaccaggtcagcctgacctgcctggtcaaaggcttctaccccagcgacatcgccgtggagtgggagagcagcgggcagccggagaacaactacaacaccacgcctcccgtgctggactccgacggctccttcttcctctacagcaggctaaccgtggacaagagcaggtggcaggaggggaatgtcttctcatgctccgtgatgcatgaggctctgcacaaccgcttcacgcagaagagcctctccctgtctccggagctgcaactggaggagagctgtgcggaggcgcaggacggggagctggacgggctgtggacgaccatcaccatcttgatcacactcttcctgttaagcgtgtgctacagtgccaccgtcaccttcttcaaggtgaagtggatcttctcctcggtggtggacctgaagcagaccatcatccccgactataggaacatgattgggcagggggcc

SEQ ID NO: 1426 - DNA, 1041 bp, artificial sequence
  IGHG3*04
gcctccaccaagggcccatcggtcttccccctggcgccctgctccaggagcacctctgggggcacagcggccctgggctgcctggtcaaggactacttccccgaaccggtgacggtgtcgtggaactcaggcgccctgaccagcggcgtgcacaccttcccggctgtcctacagtcctcaggactctactccctcagcagcgtggtgaccgtgccctccagcagcttgggcacccagacctacacctgcaacgtgaatcacaagcccagcaacaccaaggtggacaagagagttgagctcaaaaccccacttggtgacacaactcacacatgcccacggtgcccagagcccaaatcttgtgacacacctcccccgtgcccaaggtgcccagcacctgaactcctgggaggaccgtcagtcttcctcttccccccaaaacccaaggatacccttatgatttcccggacccctgaggtcacgtgcgtggtggtggacgtgagccacgaagaccccgaggtccagttcaagtggtacgtggacggcgtggaggtgcataatgccaagacaaagccgcgggaggagcagtacaacagcacgttccgtgtggtcagcgtcctcaccgtcctgcaccaggactggctgaacggcaaggagtacaagtgcaaggtctccaacaaagccctcccagcccccatcgagaaaaccatctccaaaaccaaaggacagccccgagaaccacaggtgtacaccctgcccccatcccgggaggagatgaccaagaaccaggtcagcctgacctgcctggtcaaaggcttctaccccagcgacatcgccgtggagtgggagagcagcgggcagccggagaacaactacaacaccacgcctcccatgctggactccgacggctccttcttcctctacagcaagctcaccgtggacaagagcaggtggcagcaggggaacatcttctcatgctccgtgatgcatgaggctctgcacaaccgcttcacgcagaagagcctctccctgtctccgggtaaa

SEQ ID NO: 1427 - DNA, 1131 bp, artificial sequence; identical to SEQ ID NO: 1422
  IGHG3*05

SEQ ID NO: 1428 - DNA, 1131 bp, artificial sequence
  IGHG3*06
gcttccaccaagggcccatcggtcttccccctggcgccctgctccaggagcacctctgggggcacagcggccctgggctgcctggtcaaggactacttcccagaaccggtgacggtgtcgtggaactcaggcgccctgaccagcggcgtgcacaccttcccggctgtcctacagtcctcaggactctactccctcagcagcgtggtgaccgtgccctccagcagcttgggcacccagacctacacctgcaacgtgaatcacaagcccagcaacaccaaggtggacaagagagttgagctcaaaaccccacttggtgacacaactcacacatgcccacggtgcccagagcccaaatcttgtgacacacctcccccgtgcccacggtgcccagagcccaaatcttgtgacacacctcccccatgcccacggtgcccagagcccaaatcttgtgacacacctcccccgtgcccaaggtgcccagcacctgaactcctgggaggaccgtcagtcttcctcttccccccaaaacccaaggatacccttatgatttcccggacccctgaggtcacgtgcgtggtggtggacgtgagccacgaagaccccgaggtccagttcaagtggtacgtggacggcgtggaggtgcataatgccaagacaaagccgcgggaggagcagtacaacagcacgttccgtgtggtcagcgtcctcaccgtcctgcaccaggactggctgaacggcaaggagtacaagtgcaaggtctccaacaaagccctcccagcccccatcgagaaaaccatctccaaaaccaaagggcagccccgagaaccacaggtgtacaccctgcccccatcccgggaggagatgaccaagaaccaggtcagcctgacctgcctggtcaaaggcttctaccccagcgacatcgccgtggagtgggagagcagcgggcagccggagaacaactacaagaccacgcctcccatgctggactccgacggctccttcttcctctacagcaagctcaccgtggacaagagcaggtggcagcaggggaacatcttctcatgctccgtgatgcatgaggctctgcacaaccgcttcacgcagaagagcctctccctgtctccgggtaaa

SEQ ID NO: 1429 - DNA, 1131 bp, artificial sequence
  IGHG3*07
gcttccaccaagggcccatcggtcttccccctggcgccctgctccaggagcacctctgggggcacagcggccctgggctgcctggtcaaggactacttccccgaaccggtgacggtgtcgtggaactcaggcgccctgaccagcggcgtgcacaccttcccggctgtcctacagtcctcaggactctactccctcagcagcgtggtgaccgtgccctccagcagcttgggcacccagacctacacctgcaacgtgaatcacaagcccagcaacaccaaggtggacaagagagttgagctcaaaaccccacttggtgacacaactcacacatgcccacggtgcccagagcccaaatcttgtgacacacctcccccgtgcccacggtgcccagagcccaaatcttgtgacacacctcccccatgcccacggtgcccagagcccaaatcttgtgacacacctcccccgtgcccaaggtgcccagcacctgaactcctgggaggaccgtcagtcttcctcttccccccaaaacccaaggatacccttatgatttcccggacccctgaggtcacgtgcgtggtggtggacgtgagccacgaagaccccgaggtccagttcaagtggtacgtggacggcgtggaggtgcataatgccaagacaaagccgcgggaggagcagtacaacagcacgttccgtgtggtcagcgtcctcaccgtcctgcaccaggactggctgaacggcaaggagtacaagtgcaaggtctccaacaaagccctcccagcccccatcgagaaaaccatctccaaaaccaaagggcagccccgagaaccacaggtgtacaccctgcccccatcccgggaggagatgaccaagaaccaggtcagcctgacctgcctggtcaaaggcttctaccccagcgacatcgccgtggagtgggagagcagcgggcagccggagaacaactacaagaccacgcctcccatgctggactccgacggctccttcttcctctacagcaagctcaccgtggacaagagcaggtggcagcaggggaacatcttctcatgctccgtgatgcatgaggctctgcacaaccgcttcacgcagaagagcctctccctgtctccgggtaaa

SEQ ID NO: 1430 - DNA, 1131 bp, artificial sequence
  IGHG3*08
gcttccaccaagggcccatcggtcttccccctggcgccctgctccaggagcacctctgggggcacagcggccctgggctgcctggtcaaggactacttccccgaaccggtgacggtgtcgtggaactcaggcgccctgaccagcggcgtgcacaccttcccggctgtcctacagtcctcaggactctactccctcagcagcgtggtgaccgtgccctccagcagcttgggcacccagacctacacctgcaacgtgaatcacaagcccagcaacaccaaggtggacaagagagttgagctcaaaaccccacttggtgacacaactcacacatgcccacggtgcccagagcccaaatcttgtgacacacctcccccgtgcccacggtgcccagagcccaaatcttgtgacacacctcccccatgcccacggtgcccagagcccaaatcttgtgacacacctcccccgtgcccaaggtgcccagcacctgaactcctgggaggaccgtcagtcttcctcttccccccaaaacccaaggatacccttatgatttcccggacccctgaggtcacgtgcgtggtggtggacgtgagccacgaagaccccgaggtccagttcaagtggtacgtggacggcgtggaggtgcataatgccaagacaaagccgcgggaggagcagtacaacagcacgttccgtgtggtcagcgtcctcaccgtcctgcaccaggactggctgaacggcaaggagtacaagtgcaaggtctccaacaaagccctcccagcccccatcgagaaaaccatctccaaaaccaaaggacagccccgagaaccacaggtgtacaccctgcccccatcccgggaggagatgaccaagaaccaggtcagcctgacctgcctggtcaaaggcttctaccccagcgacatcgccgtggagtgggagagcaatgggcagccggagaacaactacaacaccacgcctcccatgctggactccgacggctccttcttcctctacagcaagctcaccgtggacaagagcaggtggcagcaggggaacatcttctcatgctccgtgatgcatgaggctctgcacaaccgcttcacgcagaagagcctctccctgtctccgggtaaa

SEQ ID NO: 1431 - DNA, 1131 bp, artificial sequence
  IGHG3*09
gcttccaccaagggcccatcggtcttccccctggcgccctgctccaggagcacctctgggggcacagcggccctgggctgcctggtcaaggactacttccccgaaccggtgacggtgtcgtggaactcaggcgccctgaccagcggcgtgcacaccttcccggctgtcctacagtcctcaggactctactccctcagcagcgtggtgaccgtgccctccagcagcttgggcacccagacctacacctgcaacgtgaatcacaagcccagcaacaccaaggtggacaagagagttgagctcaaaaccccacttggtgacacaactcacacatgcccacggtgcccagagcccaaatcttgtgacacacctcccccgtgcccacggtgcccagagcccaaatcttgtgacacacctcccccatgcccacggtgcccagagcccaaatcttgtgacacacctcccccgtgcccaaggtgcccagcacctgaactcctgggaggaccgtcagtcttcctcttccccccaaaacccaaggatacccttatgatttcccggacccctgaggtcacgtgcgtggtggtggacgtgagccacgaagaccccgaggtccagttcaagtggtacgtggacggcgtggaggtgcataatgccaagacaaagccgcgggaggagcagtacaacagcacgttccgtgtggtcagcgtcctcaccgtcgtgcaccaggactggctgaacggcaaggagtacaagtgcaaggtctccaacaaagccctcccagcccccatcgagaaaaccatctccaaaaccaaaggacagccccgagaaccacaggtgtacaccctgcccccatcccgggaggagatgaccaagaaccaggtcagcctgacctgcctggtcaaaggcttctaccccagcgacatcgccgtggagtgggagagcagcgggcagccggagaacaactacaacaccacgcctcccatgctggactccgacggctccttcttcctctacagcaagctcactgtggacaagagcaggtggcagcaggggaacatcttctcatgctccgtgatgcatgaggctctgcacaaccgcttcacgcagaagagcctctccctgtctccgggtaaa

SEQ ID NO: 1432 - DNA, 1131 bp, artificial sequence
  IGHG3*10
gcttccaccaagggcccatcggtcttccccctggcgccctgctccaggagcacctctgggggcacagcggccctgggctgcctggtcaaggactacttcccagaaccggtgacggtgtcgtggaactcaggcgccctgaccagcggcgtgcacaccttcccggctgtcctacagtcctcaggactctactccctcagcagcgtggtgaccgtgccctccagcagcttgggcacccagacctacacctgcaacgtgaatcacaagcccagcaacaccaaggtggacaagagagttgagctcaaaaccccacttggtgacacaactcacacatgcccacggtgcccagagcccaaatcttgtgacacacctcccccgtgcccacggtgcccagagcccaaatcttgtgacacacctcccccatgcccacggtgcccagagcccaaatcttgtgacacacctcccccgtgcccaaggtgcccagcacctgaactcctgggaggaccgtcagtcttcctcttccccccaaaacccaaggatacccttatgatttcccggacccctgaggtcacgtgcgtggtggtggacgtgagccacgaagaccccgaggtccagttcaagtggtacgtggacggcgtggaggtgcataatgccaagacaaagccgcgggaggagcagtacaacagcacgttccgtgtggtcagcgtcctcaccgtcctgcaccaggactggctgaacggcaaggagtacaagtgcaaggtctccaacaaagccctcccagcccccatcgagaaaaccatctccaaaaccaaaggacagccccgagaaccacaggtgtacaccctgcccccatcccgggaggagatgaccaagaaccaggtcagcctgacctgcctggtcaaaggcttctaccccagcgacatcgccgtggagtgggagagcagcgggcagccggagaacaactacaacaccacgcctcccatgctggactccgacggctccttcttcctctacagcaagctcaccgtggacaagagcaggtggcagcaggggaacatcttctcatgctccgtgatgcatgaggctctgcacaaccgcttcacgcagaagagcctctccctgtctccgggtaaa

SEQ ID NO: 1433 - DNA, 1131 bp, artificial sequence
  IGHG3*11
gcttccaccaagggcccatcggtcttccccctggcgccctgctccaggagcacctctgggggcacagcggccctgggctgcctggtcaaggactacttccccgaaccggtgacggtgtcgtggaactcaggcgccctgaccagcggcgtgcacaccttcccggctgtcctacagtcctcaggactctactccctcagcagcgtggtgaccgtgccctccagcagcttgggcacccagacctacacctgcaacgtgaatcacaagcccagcaacaccaaggtggacaagagagttgagctcaaaaccccacttggtgacacaactcacacatgcccacggtgcccagagcccaaatcttgtgacacacctcccccgtgcccacggtgcccagagcccaaatcttgtgacacacctcccccatgcccacggtgcccagagcccaaatcttgtgacacacctcccccatgcccacggtgcccagcacctgaactcctgggaggaccgtcagtcttcctcttccccccaaaacccaaggatacccttatgatttcccggacccctgaggtcacgtgcgtggtggtggacgtgagccacgaagaccccgaggtccagttcaagtggtacgtggacggcgtggaggtgcataatgccaagacaaagccgcgggaggagcagttcaacagcacgttccgtgtggtcagcgtcctcaccgtcctgcaccaggactggctgaacggcaaggagtacaagtgcaaggtctccaacaaagccctcccagcccccatcgagaaaaccatctccaaaaccaaaggacagccccgagaaccacaggtgtacaccctgcccccatcccgggaggagatgaccaagaaccaggtcagcctgacctgcctggtcaaaggcttctaccccagcgacatcgccgtggagtgggagagcagcgggcagccggagaacaactacaacaccacgcctcccatgctggactccgacggctccttcttcctctacagcaagctcaccgtggacaagagcaggtggcagcaggggaacatcttctcatgctccgtgatgcatgaggctctgcacaaccgcttcacgcagaagagcctctccctgtctccgggtaaa

SEQ ID NO: 1434 - DNA, 1086 bp, artificial sequence
  IGHG3*12
gcttccaccaagggcccatcggtcttccccctggcgccctgctccaggagcacctctgggggcacagcggccctgggctgcctggtcaaggactacttccccgaaccggtgacggtgtcgtggaactcaggcgccctgaccagcggcgtgcacaccttcccggctgtcctacagtcctcaggactctactccctcagcagcgtggtgaccgtgccctccagcagcttgggcacccagacctacacctgcaacgtgaatcacaagcccagcaacaccaaggtggacaagagagttgagctcaaaaccccacttggtgacacaactcacacatgcccacggtgcccagagcccaaatcttgtgacacacctcccccgtgcccacggtgcccagagcccaaatcttgtgacacacctcccccatgcccacggtgcccagcacctgaactcctgggaggaccgtcagtcttcctcttccccccaaaacccaaggatacccttatgatttcccggacccctgaggtcacgtgcgtggtggtggacgtgagccacgaagaccccgaggtccagttcaagtggtacgtggacggcgtggaggtgcataatgccaagacaaagccgcgggaggagcagttcaacagcacgttccgtgtggtcagcgtcctcaccgtcctgcaccaggactggctgaacggcaaggagtacaagtgcaaggtctccaacaaagccctcccagcccccatcgagaaaaccatctccaaaaccaaaggacagccccgagaaccacaggtgtacaccctgcccccatcccgggaggagatgaccaagaaccaggtcagcctgacctgcctggtcaaaggcttctaccccagcgacatcgccgtggagtgggagagcagcgggcagccggagaacaactacaacaccacgcctcccatgctggactccgacggctccttcttcctctacagcaagctcaccgtggacaagagcaggtggcagcaggggaacatcttctcatgctccgtgatgcatgaggctctgcacaaccgcttcacgcagaagagcctctccctgtctccgggtaaa

SEQ ID NO: 1435 - DNA, 1131 bp, artificial sequence
  IGHG3*13
gcttccaccaagggcccatcggtcttccccctggcgccctgctccaggagcacctctgggggcacagcggccctgggctgcctggtcaaggactacttccccgaaccggtgacggtgtcgtggaactcaggcgccctgaccagcggcgtgcacaccttcccggctgtcctacagtcctcaggactctactccctcagcagcgtggtgaccgtgccctccagcagcttgggcacccagacctacacctgcaacgtgaatcacaagcccagcaacaccaaggtggacaagagagttgagctcaaaaccccacttggtgacacaactcacacatgcccacggtgcccagagcccaaatcttgtgacacacctcccccgtgcccacggtgcccagagcccaaatcttgtgacacacctcccccatgcccacggtgcccagagcccaaatcttgtgacacacctcccccgtgcccaaggtgcccagcacctgaactcctgggaggaccgtcagtcttcctcttccccccaaaacccaaggatacccttatgatttcccggacccctgaggtcacgtgcgtggtggtggacgtgagccacgaagaccccgaggtccagttcaagtggtacgtggacggcgtggaggtgcataatgccaagacaaagccgcgggaggagcagtacaacagcacgttccgtgtggtcagcgtcctcaccgtcctgcaccaggactggctgaacggcaaggagtacaagtgcaaggtctccaacaaagccctcccagcccccatcgagaaaaccatctccaaaaccaaaggacagccccgagaaccacaggtgtacaccctgcccccatcccgggaggagatgaccaagaaccaggtcagcctgacctgcctggtcaaaggcttctaccccagcgacatcgccgtggagtgggagagcagcgggcagccggagaacaactacaagaccacacctcccatgctggactccgacggctccttcttcctctacagcaagctcaccgtggacaagagcaggtggcaggaggggaacatcttctcatgctccgtgatgcatgaggctctgcacaaccgcttcacgcagaagagcctctccctgtctccgggtaaa

SEQ ID NO: 1436 - DNA, 1131 bp, artificial sequence
  IGHG3*14
gcttccaccaagggcccatcggtcttccccctggcgccctgctccaggagcacctctgggggcacagcggccctgggctgcctggtcaaggactacttccccgaaccggtgacggtgtcgtggaactcaggcgccctgaccagcggcgtgcacaccttcccggctgtcctacagtcctcaggactctactccctcagcagcgtggtgaccgtgccctccagcagcttgggcacccagacctacacctgcaacgtgaatcacaagcccagcaacaccaaggtggacaagagagttgagctcaaaaccccacttggtgacacaactcacacatgcccacggtgcccagagcccaaatcttgtgacacacctcccccgtgcccacggtgcccagagcccaaatcttgtgacacacctcccccatgcccacggtgcccagagcccaaatcttgtgacacacctcccccgtgcccaaggtgcccagcacctgaactcctgggaggaccgtcagtcttcctcttccccccaaaacccaaggatacccttatgatttcccggacccctgaggtcacgtgcgtggtggtggacgtgagccacgaagaccccgaggtccagttcaagtggtacgtggacggcgtggaggtgcataatgccaagacaaagctgcgggaggagcagtacaacagcacgttccgtgtggtcagcgtcctcaccgtcctgcaccaggactggctgaacggcaaggagtacaagtgcaaggtctccaacaaagccctcccagcccccatcgagaaaaccatctccaaaaccaaaggacagccccgagaaccacaggtgtacaccctgcccccatcccgggaggagatgaccaagaaccaggtcagcctgacctgcctggtcaaaggcttctaccccagcgacatcgccgtggagtgggagagcaatgggcagccggagaacaactacaacaccacgcctcccatgctggactccgacggctccttcttcctctacagcaagctcaccgtggacaagagcaggtggcagcaggggaacatcttctcatgctccgtgatgcatgaggctctgcacaaccgctacacgcagaagagcctctccctgtctccgggtaaa

SEQ ID NO: 1437 - DNA, 1131 bp, artificial sequence
  IGHG3*15
gcttccaccaagggcccatcggtcttccccctggcgccctgctccaggagcacctctgggggcacagcggccctgggctgcctggtcaaggactacttccccgaaccggtgacggtgtcgtggaactcaggcgccctgaccagcggcgtgcacaccttcccggctgtcctacagtcctcaggactctactccctcagcagcgtggtgaccgtgccctccagcagcttgggcacccagacctacacctgcaacgtgaatcacaagcccagcaacaccaaggtggacaagagagttgagctcaaaaccccacttggtgacacaactcacacatgcccacggtgcccagagcccaaatcttgtgacacacctcccccgtgcccacggtgcccagagcccaaatcttgtgacacacctcccccatgcccacggtgcccagagcccaaatcttgtgacacacctcccccgtgcccaaggtgcccagcacctgaactcctgggaggaccgtcagtcttcctcttccccccaaaacccaaggatacccttatgatttcccggacccctgaggtcacgtgcgtggtggtggacgtgagccacgaagaccccgaggtccagttcaagtggtacgtggacggcgtggaggtgcataatgccaagacaaagctgcgggaggagcagtacaacagcacgttccgtgtggtcagcgtcctcaccgtcctgcaccaggactggctgaacggcaaggagtacaagtgcaaggtctccaacaaagccctcccagcccccatcgagaaaaccatctccaaaaccaaaggacagccccgagaaccacaggtgtacaccctgcccccatcccgggaggagatgaccaagaaccaggtcagcctgacctgcctggtcaaaggcttctaccccagcgacatcgccgtggagtgggagagcaatgggcagccggagaacaactacaagaccacgcctcccatgctggactccgacggctccttcttcctctacagcaagctcaccgtggacaagagcaggtggcagcaggggaacatcttctcatgctccgtgatgcatgaggctctgcacaaccgctacacgcagaagagcctctccctgtctccgggtaaa

SEQ ID NO: 1438 - DNA, 1131 bp, artificial sequence
  IGHG3*16
gcttccaccaagggcccatcggtcttccccctggcgccctgctccaggagcacctctgggggcacagcggccctgggctgcctggtcaaggactacttccccgaaccggtgacggtgtcgtggaactcaggcgccctgaccagcggcgtgcacaccttcccggctgtcctacagtcctcaggactctactccctcagcagcgtggtgaccgtgccctccagcagcttgggcacccagacctacacctgcaacgtgaatcacaagcccagcaacaccaaggtggacaagagagttgagctcaaaaccccacttggtgacacaactcacacatgcccacggtgcccagagcccaaatcttgtgacacacctcccccgtgcccacggtgcccagagcccaaatcttgtgacacacctcccccatgcccacggtgcccagagcccaaatcttgtgacacacctcccccgtgcccaaggtgcccagcacctgaactcctgggaggaccgtcagtcttcctcttccccccaaaacccaaggatacccttatgatttcccggacccctgaggtcacgtgcgtggtggtggacgtgagccacgaagaccccgaggtccagttcaagtggtacgtggacggcgtggaggtgcataatgccaagacaaagctgcgggaggagcagtacaacagcacgttccgtgtggtcagcgtcctcaccgtcctgcaccaggactggctgaacggcaaggagtacaagtgcaaggtctccaacaaagccctcccagcccccatcgagaaaaccatctccaaagccaaaggacagccccgagaaccacaggtgtacaccctgcccccatcccgggaggagatgaccaagaaccaggtcagcctgacctgcctggtcaaaggcttctaccccagcgacatcgccgtggagtgggagagcaatgggcagccggagaacaactacaacaccacgcctcccatgctggactccgacggctccttcttcctctacagcaagctcaccgtggacaagagcaggtggcagcaggggaacatcttctcatgctccgtgatgcatgaggctctgcacaaccgctacacgcagaagagcctctccctgtctccgggtaaa

SEQ ID NO: 1439 - DNA, 1086 bp, artificial sequence
  IGHG3*17
gcttccaccaagggcccatcggtcttccccctggcgccctgctccaggagcacctctgggggcacagcggccctgggctgcctggtcaaggactacttccccgaaccggtgacggtgtcgtggaactcaggcgccctgaccagcggcgtgcacaccttcccggctgtcctacagtcctcaggactctactccctcagcagcgtggtgaccgtgccctccagcaacttcggcacccagacctacacctgcaacgtgaatcacaagcccagcaacaccaaggtggacaagagagttgagctcaaaaccccacttggtgacacaactcacacatgcccacggtgcccagagcccaaatcttgtgacacacctcccccgtgcccacggtgcccagagcccaaatcttgtgacacacctcccccgtgcccaaggtgcccagcacctgaactcctgggaggaccgtcagtcttcctcttccccccaaaacccaaggatacccttatgatttcccggacccctgaggtcacgtgcgtggtggtggacgtgagccacgaagaccccgaggtccagttcaagtggtacgtggacggcgtggaggtgcataatgccaagacaaagccgcgggaggagcagtacaacagcacgttccgtgtggtcagcgtcctcaccgtcctgcaccaggactggctgaacggcaaggagtacaagtgcaaggtctccaacaaagccctcccagcccccatcgagaaaaccatctccaaaaccaaaggacagccccgagaaccacaggtgtacaccctgcccccatcccgggaggagatgaccaagaaccaggtcagcctgacctgcctggtcaaaggcttctaccccagcgacatcgccatggagtgggagagcagcgggcagccggagaacaactacaagaccacgcctcccgtgctggactccgacggctccttcttcctctacagcaagctcaccgtggacaagagcaggtggcagcaggggaacatcttctcatgctccgtgatgcatgaggctctgcacaaccactacacgcagaagagcctctccctgtctccgggtaaa

SEQ ID NO: 1440 - DNA, 1086 bp, artificial sequence
  IGHG3*18
gcttccaccaagggcccatcggtcttccccctggcgccctgctccaggagcacctctgggggcacagcggccctgggctgcctggtcaaggactacttccccgaaccggtgacggtgtcgtggaactcaggcgccctgaccagcggcgtgcacaccttcccggctgtcctacagtactcaggactctactccctcagcagcgtggtgaccgtgccctccagcagcttgggcacccagacctacacctgcaacgtgaatcacaagcccagcaacaccaaggtggacaagagagttgagctcaaaaccccacttggtgacacaactcacacatgcccacggtgcccagagcccaaatcttgtgacacacctcccccgtgcccacggtgcccagagcccaaatcttgtgacacacctcccccgtgcccaaggtgcccagcacctgaactcctgggaggaccgtcagtcttcctcttccccccaaaacccaaggatacccttatgatttcccggacccctgaggtcacgtgcgtggtggtggacgtgagccacgaagaccccgaggtccagttcaagtggtacgtggacggcgtggaggtgcataatgccaagacaaagccgtgggaggagcagtacaacagcacgttccgtgtggtcagcgtcctcaccgtcctgcaccaggactggctgaacggcaaggagtacaagtgcaaggtctccaacaaagccctcccagcccccatcgagaaaaccatctccaaaaccaaaggacagccccgagaaccacaggtgtacaccctgcccccatcccgggaggagatgaccaagaaccaggtcagcctgacctgcctggtcaaaggcttctaccccagcgacatcgccatggagtgggagagcagcgggcagccggagaacaactacaagaccacgcctcccgtgctggactccgacggctccttcttcctctacagcaagctcaccgtggacaagagcaggtggcagcaggggaacatcttctcatgctccgtgatgcatgaggctctgcacaaccactacacgcagaagagcctctccctgtctccgggtaaa

SEQ ID NO: 1441 - DNA, 1086 bp, artificial sequence
  IGHG3*19
gcttccaccaagggcccatcggtcttccccctggcgccctgctccaggagcacctctgggggcacagcggccctgggctgcctggtcaaggactacttccccgaaccggtgacggtgtcgtggaactcaggcgccctgaccagcggcgtgcacaccttcccggctgtcctacagtcctcaggactctactccctcagcagcgtggtgaccgtgccctccagcagcttgggcacccagacctacacctgcaacgtgaatcacaagcccagcaacaccaaggtggacaagagagttgagctcaaaaccccacttggtgacacaactcacacatgcccacggtgcccagagcccaaatcttgtgacacacctcccccgtgcccacggtgcccagagcccaaatcttgtgacacacctcccccgtgcccaaggtgcccagcacctgaactcctgggaggaccgtcagtcttcctcttccccccaaaacccaaggatacccttatgatttcccggacccctgaggtcacgtgcgtggtggtggacgtgagccacgaagaccccgaggtccagttcaagtggtacgtggacggcgtggaggtgcataatgccaagacaaagccgtgggaggagcagtacaacagcacgttccgtgtggtcagcgtcctcaccgtcctgcaccaggactggctgaacggcaaggagtacaagtgcaaggtctccaacaaagccctcccagcccccatcgagaaaaccatctccaaaaccaaaggacagccccgagaaccacaggtgtacaccctgcccccatcccgggaggagatgaccaagaaccaggtcagcctgacctgcctggtcaaaggcttctaccccagcgacatcgccatggagtgggagagcagcgggcagccggagaacaactacaagaccacgcctcccgtgctggactccgacggctccttcttcctctacagcaagctcaccgtggacaagagcaggtggcagcaggggaacatcttctcatgctccgtgatgcatgaggctctgcacaaccactacacgcagaagagcctctccctgtctccgggtaaa

SEQ ID NO: 1442 - DNA, 981 bp, artificial sequence
  IGHG4*01
gcttccaccaagggcccatccgtcttccccctggcgccctgctccaggagcacctccgagagcacagccgccctgggctgcctggtcaaggactacttccccgaaccggtgacggtgtcgtggaactcaggcgccctgaccagcggcgtgcacaccttcccggctgtcctacagtcctcaggactctactccctcagcagcgtggtgaccgtgccctccagcagcttgggcacgaagacctacacctgcaacgtagatcacaagcccagcaacaccaaggtggacaagagagttgagtccaaatatggtcccccatgcccatcatgcccagcacctgagttcctggggggaccatcagtcttcctgttccccccaaaacccaaggacactctcatgatctcccggacccctgaggtcacgtgcgtggtggtggacgtgagccaggaagaccccgaggtccagttcaactggtacgtggatggcgtggaggtgcataatgccaagacaaagccgcgggaggagcagttcaacagcacgtaccgtgtggtcagcgtcctcaccgtcctgcaccaggactggctgaacggcaaggagtacaagtgcaaggtctccaacaaaggcctcccgtcctccatcgagaaaaccatctccaaagccaaagggcagccccgagagccacaggtgtacaccctgcccccatcccaggaggagatgaccaagaaccaggtcagcctgacctgcctggtcaaaggcttctaccccagcgacatcgccgtggagtgggagagcaatgggcagccggagaacaactacaagaccacgcctcccgtgctggactccgacggctccttcttcctctacagcaggctaaccgtggacaagagcaggtggcaggaggggaatgtcttctcatgctccgtgatgcatgaggctctgcacaaccactacacacagaagagcctctccctgtctctgggtaaa

SEQ ID NO: 1443 - DNA, 687 bp, artificial sequence
  IGHG4*02
gagtccaaatatggtcccccgtgcccatcatgcccagcacctgagttcctggggggaccatcagtcttcctgttccccccaaaacccaaggacactctcatgatctcccggacccctgaggtcacgtgcgtggtggtggacgtgagccaggaagaccccgaggtccagttcaactggtacgtggatggcgtggaggtgcataatgccaagacaaagccgcgggaggagcagttcaacagcacgtaccgtgtggtcagcgtcctcaccgtcgtgcaccaggactggctgaacggcaaggagtacaagtgcaaggtctccaacaaaggcctcccgtcctccatcgagaaaaccatctccaaagccaaagggcagccccgagagccacaggtgtacaccctgcccccatcccaggaggagatgaccaagaaccaggtcagcctgacctgcctggtcaaaggcttctaccccagcgacatcgccgtggagtgggagagcaatgggcagccggagaacaactacaagaccacgcctcccgtgctggactccgacggctccttcttcctctacagcaggctaaccgtggacaagagcaggtggcaggaggggaatgtcttctcatgctccgtgatgcatgaggctctgcacaaccactacacgcagaagagcctctccctgtctctgggtaaa

SEQ ID NO: 1444 - DNA, 651 bp, artificial sequence
  IGHG4*03
gcacctgagttcctggggggaccatcagtcttcctgttccccccaaaacccaaggacactctcatgatctcccggacccctgaggtcacgtgcgtggtggtggacgtgagccaggaagaccccgaggtccagttcaactggtacgtggatggcgtggaggtgcataatgccaagacaaagccgcgggaggagcagttcaacagcacgtaccgtgtggtcagcgtcctcaccgtcctgcaccaggactggctgaacggcaaggagtacaagtgcaaggtctccaacaaaggcctcccgtcctccatcgagaaaaccatctccaaagccaaagggcagccccgagagccacaggtgtacaccctgcccccatcccaggaggagatgaccaagaaccaggtcagcctgacctgcctggtcaaaggcttctaccccagcgacatcgccgtggagtgggagagcaatgggcagccggagaacaactacaagaccacgcctcccgtgctggactccgacggctccttcttcctctacagcaagctcaccgtggacaagagcaggtggcaggaggggaacgtcttctcatgctccgtgatgcatgaggctctgcacaaccactacacgcagaagagcctctccctgtctctgggtaaa

SEQ ID NO: 1445 - DNA, 981 bp, artificial sequence
  IGHG4*04
gcttccaccaagggcccatcggtcttccccctggcgccctgctccaggagcacctccgagagcacagccgccctgggctgcctggtcaaggactacttccccgaaccggtgacggtgtcgtggaactcaggcgccctgaccagcggcgtgcacaccttcccggctgtcctacagtcctcaggactctactccctcagcagcgtggtgaccgtgccctccagcagcttgggcacgaagacctacacctgcaacgtagatcacaagcccagcaacaccaaggtggacaagagagttgagtccaaatatggtcccccatgcccatcatgcccagcacctgagttcctggggggaccatcagtcttcctgttccccccaaaacccaaggacactctcatgatctcccggacccctgaggtcacgtgcgtggtggtggacgtgagccaggaagaccccgaggtccagttcaactggtacgtggatggcgtggaggtgcataatgccaagacaaagccgcgggaggagcagttcaacagcacgtaccgtgtggtcagcgtcctcaccgtcctgcaccaggactggctgaacggcaaggagtacaagtgcaaggtctccaacaaaggcctcccgtcctccatcgagaaaaccatctccaaagccaaagggcagccccgagagccacaggtgtacaccctgcccccatcccaggaggagatgaccaagaaccaggtcagcctgacctgcctggtcaaaggcttctaccccagcgacatcgccgtggagtgggagagcaatgggcagccggagaacaactacaagaccacgcctcccgtgctggactccgacggctccttcttcctctacagcaggctcaccgtggacaagagcaggtggcaggaggggaatgtcttctcatgctccgtgatgcatgaggctctgcacaaccactacacacagaagagcctctccctgtctctgggtaaa

SEQ ID NO: 1446 - DNA, 1188 bp, artificial sequence
  IGHG4*04
gcttccaccaagggcccatcggtcttccccctggcgccctgctccaggagcacctccgagagcacagccgccctgggctgcctggtcaaggactacttccccgaaccggtgacggtgtcgtggaactcaggcgccctgaccagcggcgtgcacaccttcccggctgtcctacagtcctcaggactctactccctcagcagcgtggtgaccgtgccctccagcagcttgggcacgaagacctacacctgcaacgtagatcacaagcccagcaacaccaaggtggacaagagagttgagtccaaatatggtcccccatgcccatcatgcccagcacctgagttcctggggggaccatcagtcttcctgttccccccaaaacccaaggacactctcatgatctcccggacccctgaggtcacgtgcgtggtggtggacgtgagccaggaagaccccgaggtccagttcaactggtacgtggatggcgtggaggtgcataatgccaagacaaagccgcgggaggagcagttcaacagcacgtaccgtgtggtcagcgtcctcaccgtcctgcaccaggactggctgaacggcaaggagtacaagtgcaaggtctccaacaaaggcctcccgtcctccatcgagaaaaccatctccaaagccaaagggcagccccgagagccacaggtgtacaccctgcccccatcccaggaggagatgaccaagaaccaggtcagcctgacctgcctggtcaaaggcttctaccccagcgacatcgccgtggagtgggagagcaatgggcagccggagaacaactacaagaccacgcctcccgtgctggactccgacggctccttcttcctctacagcaggctcaccgtggacaagagcaggtggcaggaggggaatgtcttctcatgctccgtgatgcatgaggctctgcacaaccactacacacagaagagcctctccctgtctctggagctgcaactggaggagagctgtgcggaggcgcaggacggggagctggacgggctgtggacgaccatcaccatcttcatcacactcttcctgctaagcgtgtgctacagtgccaccgtcaccttcttcaaggtgaagtggatcttctcctcagtggtggacctgaagcagaccatcgtccccgactacaggaacatgataaggcagggggcc

SEQ ID NO: 1447 - DNA, 1419 bp, artificial sequence; identical to SEQ ID NO: 1380
  IGHM*01

SEQ ID NO: 1448 - DNA, 1359 bp, artificial sequence
  IGHM*03
gggagtgcatccgccccaacccttttccccctcgtctcctgtgagaattccccgtcggatacgagcagcgtggccgttggctgcctcgcacaggacttccttcccgactccatcactttctcctggaaatacaagaacaactctgacatcagcagcacccggggcttcccatcagtcctgagagggggcaagtacgcagccacctcacaggtgctgctgccttccaaggacgtcatgcagggcacagacgaacacgtggtgtgcaaagtccagcaccccaacggcaacaaagaaaagaacgtgcctcttccagtgattgctgagctgcctcccaaagtgagcgtcttcgtcccaccccgcgacggcttcttcggcaacccccgcaagtccaagctcatctgccaggccacgggtttcagtccccggcagattcaggtgtcctggctgcgcgaggggaagcaggtggggtctggcgtcaccacggaccaggtgcaggctgaggccaaagagtctgggcccacgacctacaaggtgaccagcacactgaccatcaaagagagcgactggctcagccagagcatgttcacctgccgcgtggatcacaggggcctgaccttccagcagaatgcgtcctccatgtgtgtccccgatcaagacacagccatccgggtcttcgccatccccccatcctttgccagcatcttcctcaccaagtccaccaagttgacctgcctggtcacagacctgaccacctatgacagcgtgaccatctcctggacccgccagaatggcgaagctgtgaaaacccacaccaacatctccgagagccaccccaatgccactttcagcgccgtgggtgaggccagcatctgcgaggatgactggaattccggggagaggttcacgtgcaccgtgacccacacagacctgccctcgccactgaagcagaccatctcccggcccaagggggtggccctgcacaggcccgatgtctacttgctgccaccagcccgggagcagctgaacctgcgggagtcggccaccatcacgtgcctggtgacgggcttctctcccgcggacgtcttcgtgcagtggatgcagagggggcagcccttgtccccggagaagtatgtgaccagcgccccaatgcctgagccccaggccccaggccggtacttcgcccacagcatcctgaccgtgtccgaagaggaatggaacacgggggagacctacacctgcgtggtggcccatgaggccctgcccaacagggtcaccgagaggaccgtggacaagtccaccggtaaacccaccctgtacaacgtgtccctggtcatgtccgacacagctggcacctgctac

SEQ ID NO: 1449 - DNA, 1422 bp, artificial sequence
  IGHM*03
gggagtgcatccgccccaacccttttccccctcgtctcctgtgagaattccccgtcggatacgagcagcgtggccgttggctgcctcgcacaggacttccttcccgactccatcactttctcctggaaatacaagaacaactctgacatcagcagcacccggggcttcccatcagtcctgagagggggcaagtacgcagccacctcacaggtgctgctgccttccaaggacgtcatgcagggcacagacgaacacgtggtgtgcaaagtccagcaccccaacggcaacaaagaaaagaacgtgcctcttccagtgattgctgagctgcctcccaaagtgagcgtcttcgtcccaccccgcgacggcttcttcggcaacccccgcaagtccaagctcatctgccaggccacgggtttcagtccccggcagattcaggtgtcctggctgcgcgaggggaagcaggtggggtctggcgtcaccacggaccaggtgcaggctgaggccaaagagtctgggcccacgacctacaaggtgaccagcacactgaccatcaaagagagcgactggctcagccagagcatgttcacctgccgcgtggatcacaggggcctgaccttccagcagaatgcgtcctccatgtgtgtccccgatcaagacacagccatccgggtcttcgccatccccccatcctttgccagcatcttcctcaccaagtccaccaagttgacctgcctggtcacagacctgaccacctatgacagcgtgaccatctcctggacccgccagaatggcgaagctgtgaaaacccacaccaacatctccgagagccaccccaatgccactttcagcgccgtgggtgaggccagcatctgcgaggatgactggaattccggggagaggttcacgtgcaccgtgacccacacagacctgccctcgccactgaagcagaccatctcccggcccaagggggtggccctgcacaggcccgatgtctacttgctgccaccagcccgggagcagctgaacctgcgggagtcggccaccatcacgtgcctggtgacgggcttctctcccgcggacgtcttcgtgcagtggatgcagagggggcagcccttgtccccggagaagtatgtgaccagcgccccaatgcctgagccccaggccccaggccggtacttcgcccacagcatcctgaccgtgtccgaagaggaatggaacacgggggagacctacacctgcgtggtggcccatgaggccctgcccaacagggtcaccgagaggaccgtggacaagtccaccgagggggaggtgagcgccgacgaggagggctttgagaacctgtgggccaccgcctccaccttcatcgtcctcttcctcctgagcctcttctacagtaccaccgtcaccttgttcaaggtgaaa

SEQ ID NO: 1450 - protein, 13 aa, Homo sapiens
  Top 50 TRA read sequence
CVVRATGTALIFG

SEQ ID NO: 1451 - protein, 14 aa, Homo sapiens
  Top 50 TRA read sequence
CAEGGTRAGEHLLL

SEQ ID NO: 1452 - protein, 13 aa, Homo sapiens
  Top 50 TRA read sequence
CVAYTGRRALTFG

SEQ ID NO: 1453 - protein, 14 aa, Homo sapiens
  Top 50 TRA read sequence
CIVLIQGAQKLVFG

SEQ ID NO: 1454 - protein, 14 aa, Homo sapiens
  Top 50 TRA read sequence
CAVNMDSNYQLIWG

SEQ ID NO: 1455 - protein, 15 aa, Homo sapiens
  Top 50 TRA read sequence
CAVETRGNTGKLIFG

SEQ ID NO: 1456 - protein, 14 aa, Homo sapiens
  Top 50 TRA read sequence
CVVSGPYNNDMRFG

SEQ ID NO: 1457 - protein, 15 aa, Homo sapiens
  Top 50 TRA read sequence
CAVAVVDSSYKLIFG

SEQ ID NO: 1458 - protein, 14 aa, Homo sapiens
  Top 50 TRA read sequence
CAGFYNQGGKLIFG

SEQ ID NO: 1459 - protein, 15 aa, Homo sapiens
  Top 50 TRA read sequence
CAVEDRAAGNKLTFG

SEQ ID NO: 1460 - protein, 15 aa, Homo sapiens
  Top 50 TRA read sequence
CALSSTNSGYALNFG

SEQ ID NO: 1461 - protein, 15 aa, Homo sapiens
  Top 50 TRA read sequence
CALRGNTNAGKSTFG

SEQ ID NO: 1462 - protein, 17 aa, Homo sapiens
  Top 50 TRA read sequence
CVVSARYSREEETNSPL

SEQ ID NO: 1463 - protein, 15 aa, Homo sapiens
  Top 50 TRA read sequence
CAENSKTSGSRLTFG

SEQ ID NO: 1464 - protein, 15 aa, Homo sapiens
  Top 50 TRA read sequence
CALSWDTGRRALTFG

SEQ ID NO: 1465 - protein, 12 aa, Homo sapiens
  Top 50 TRA read sequence
CVVTTVDDMRFG

SEQ ID NO: 1466 - protein, 13 aa, Homo sapiens
  Top 50 TRA read sequence
CSLSGSARQLTFG

SEQ ID NO: 1467 - protein, 14 aa, Homo sapiens
  Top 50 TRA read sequence
CAMRPFGNEKLTFG

SEQ ID NO: 1468 - protein, 14 aa, Homo sapiens
  Top 50 TRA read sequence
CALYGGATNKLIFG

SEQ ID NO: 1469 - protein, 15 aa, Homo sapiens
  Top 50 TRA read sequence
CAMSEGNAGNMLTFG

SEQ ID NO: 1470 - protein, 16 aa, Homo sapiens
  Top 50 TRA read sequence
CALSPLSGGSYIPTFG

SEQ ID NO: 1471 - protein, 14 aa, Homo sapiens
  Top 50 TRA read sequence
CVVRKYWRLQNYLW

SEQ ID NO: 1472 - protein, 17 aa, Homo sapiens
  Top 50 TRA read sequence
CALRFLPGGGYNKLIFG

SEQ ID NO: 1473 - protein, 16 aa, Homo sapiens
  Top 50 TRA read sequence
CALVPRRGATNKLIFG

SEQ ID NO: 1474 - protein, 11 aa, Homo sapiens
  Top 50 TRA read sequence
CAADDYKLSFG

SEQ ID NO: 1475 - protein, 14 aa, Homo sapiens
  Top 50 TRA read sequence
CANSGGSNYKLTFG

SEQ ID NO: 1476 - protein, 13 aa, Homo sapiens
  Top 50 TRA read sequence
CALDGNAGKSTFG

SEQ ID NO: 1477 - protein, 14 aa, Homo sapiens
  Top 50 TRA read sequence
CAASSSGGNMLTFG

SEQ ID NO: 1478 - protein, 13 aa, Homo sapiens
  Top 50 TRA read sequence
CALIGGYQKVTFG

SEQ ID NO: 1479 - protein, 9 aa, Homo sapiens
  Top 50 TRA read sequence
CALRVTCAL

SEQ ID NO: 1480 - protein, 15 aa, Homo sapiens
  Top 50 TRA read sequence
CAVVEGTGGFKTIFG

SEQ ID NO: 1481 - protein, 15 aa, Homo sapiens
  Top 50 TRA read sequence
CALGLMGNFNKFYFG

SEQ ID NO: 1482 - protein, 15 aa, Homo sapiens
  Top 50 TRA read sequence
CAVDRNTGGFKTIFG

SEQ ID NO: 1483 - protein, 13 aa, Homo sapiens
  Top 50 TRA read sequence
CAASRGANNLFFG

SEQ ID NO: 1484 - protein, 16 aa, Homo sapiens
  Top 50 TRA read sequence
CALRPNSNSGYALNFG

SEQ ID NO: 1485 - protein, 14 aa, Homo sapiens
  Top 50 TRA read sequence
CALNYNQGGKLIFG

SEQ ID NO: 1486 - protein, 11 aa, Homo sapiens
  Top 50 TRA read sequence
CAGNNNDMRFG

SEQ ID NO: 1487 - protein, 12 aa, Homo sapiens
  Top 50 TRA read sequence
CAVSNDYKLSFG

SEQ ID NO: 1488 - protein, 13 aa, Homo sapiens
  Top 50 TRA read sequence
CAVPFGNEKLTFG

SEQ ID NO: 1489 - protein, 15 aa, Homo sapiens
  Top 50 TRA read sequence
CALGASGSARQLTFG

SEQ ID NO: 1490 - protein, 14 aa, Homo sapiens
  Top 50 TRA read sequence
CALSDRAGNMLTFG

SEQ ID NO: 1491 - protein, 14 aa, Homo sapiens
  Top 50 TRA read sequence
CATHTGTASKLTFG

SEQ ID NO: 1492 - protein, 15 aa, Homo sapiens
  Top 50 TRA read sequence
CALPPSGGSYIPTFG

SEQ ID NO: 1493 - protein, 15 aa, Homo sapiens
  Top 50 TRA read sequence
CVVSPLTNAGKSTFG

SEQ ID NO: 1494 - protein, 15 aa, Homo sapiens
  Top 50 TRA read sequence
CATRRGTPMQANQPL

SEQ ID NO: 1495 - protein, 16 aa, Homo sapiens
  Top 50 TRA read sequence
CAVETSYSGTYKYIFG

SEQ ID NO: 1496 - protein, 17 aa, Homo sapiens
  Top 50 TRA read sequence
CIVRSHTTGTASKLTFG

SEQ ID NO: 1497 - protein, 11 aa, Homo sapiens
  Top 50 TRA read sequence
CASLFQKLVFG

SEQ ID NO: 1498 - protein, 16 aa, Homo sapiens
  Top 50 TRA read sequence
CAYRSENSGSPEAGIW

SEQ ID NO: 1499 - protein, 15 aa, Homo sapiens
  Top 50 TRA read sequence
CAVTFGDSNYQLIWG

SEQ ID NO: 1500 - protein, 15 aa, Homo sapiens
  Top 50 TRB read sequence
CSVERGGSLGEQYFG

SEQ ID NO: 1501 - protein, 15 aa, Homo sapiens
  Top 50 TRB read sequence
CSARTLAGHYEQYFG

SEQ ID NO: 1502 - protein, 16 aa, Homo sapiens
  Top 50 TRB read sequence
CASSYPGTGNHEQYFG

SEQ ID NO: 1503 - protein, 15 aa, Homo sapiens
  Top 50 TRB read sequence
CSVERGGSLGGAVLR

SEQ ID NO: 1504 - protein, 16 aa, Homo sapiens
  Top 50 TRB read sequence
CSANPGQQLQETQYFG

SEQ ID NO: 1505 - protein, 14 aa, Homo sapiens
  Top 50 TRB read sequence
CSVEREAPLGSSTS

SEQ ID NO: 1506 - protein, 14 aa, Homo sapiens
  Top 50 TRB read sequence
CSVERGGSLGEQTS

SEQ ID NO: 1507 - protein, 13 aa, Homo sapiens
  Top 50 TRB read sequence
CSVEERKGEQYFG

SEQ ID NO: 1508 - protein, 15 aa, Homo sapiens
  Top 50 TRB read sequence
CATSRDGQQETQYFG

SEQ ID NO: 1509 - protein, 14 aa, Homo sapiens
  Top 50 TRB read sequence
CSARTGDYYEQYFG

SEQ ID NO: 1510 - protein, 16 aa, Homo sapiens
  Top 50 TRB read sequence
CASSLAGGSYNEQFFG

SEQ ID NO: 1511 - protein, 14 aa, Homo sapiens
  Top 50 TRB read sequence
CSVSETGIYEQYFG

SEQ ID NO: 1512 - protein, 17 aa, Homo sapiens
  Top 50 TRB read sequence
CSASRGLAGGSYEQYFG

SEQ ID NO: 1513 - protein, 14 aa, Homo sapiens
  Top 50 TRB read sequence
  misc_feature (6)..(6): Xaa can be any naturally occurring amino acid
CSARTXRDIQQYFG

SEQ ID NO: 1514 - protein, 14 aa, Homo sapiens
  Top 50 TRB read sequence
CSALAGVGDTQYFG

SEQ ID NO: 1515 - protein, 15 aa, Homo sapiens
  Top 50 TRB read sequence
CSVERGRLPWGSSTS

SEQ ID NO: 1516 - protein, 16 aa, Homo sapiens
  Top 50 TRB read sequence
CSVEVLAGGPNEQFFG

SEQ ID NO: 1517 - protein, 23 aa, Homo sapiens
  Top 50 TRB read sequence
CSVTGTSGRATTSPSSYNEQFFG

SEQ ID NO: 1518 - protein, 16 aa, Homo sapiens
  Top 50 TRB read sequence
CSVATGGDGANVLTFG

SEQ ID NO: 1519 - protein, 17 aa, Homo sapiens
  Top 50 TRB read sequence
CSVGGLRDRPSYEQYFG

SEQ ID NO: 1520 - protein, 12 aa, Homo sapiens
  Top 50 TRB read sequence
CSQIEGDTQYFG

SEQ ID NO: 1521 - protein, 13 aa, Homo sapiens
  Top 50 TRB read sequence
CASSQTVYEQYFG

SEQ ID NO: 1522 - protein, 16 aa, Homo sapiens
  Top 50 TRB read sequence
CSAVEARKSSYEQYFG

SEQ ID NO: 1523 - protein, 16 aa, Homo sapiens
  Top 50 TRB read sequence
CSVGAGAGGTDTQYFG

SEQ ID NO: 1524 - protein, 15 aa, Homo sapiens
  Top 50 TRB read sequence
CSVERGRLPWGAVLR

SEQ ID NO: 1525 - protein, 12 aa, Homo sapiens
  Top 50 TRB read sequence
CASTSSETQYFG

SEQ ID NO: 1526 - protein, 14 aa, Homo sapiens
  Top 50 TRB read sequence
CSVERGGSLGSSTS

SEQ ID NO: 1527 - protein, 23 aa, Homo sapiens
  Top 50 TRB read sequence
CAISETPTSNNPHSSYNSPLHFG

SEQ ID NO: 1528 - protein, 15 aa, Homo sapiens
  Top 50 TRB read sequence
CASMVGPANTEAFFG

SEQ ID NO: 1529 - protein, 15 aa, Homo sapiens
  Top 50 TRB read sequence
CASSQYLISYEQYFG

SEQ ID NO: 1530 - protein, 15 aa, Homo sapiens
  Top 50 TRB read sequence
CSVGGVSSYNEQFFG

SEQ ID NO: 1531 - protein, 14 aa, Homo sapiens
  Top 50 TRB read sequence
CATSTQKNQPQHFG

SEQ ID NO: 1532 - protein, 14 aa, Homo sapiens
  Top 50 TRB read sequence
CSVEAGVGETQYFG

SEQ ID NO: 1533 - protein, 14 aa, Homo sapiens
  Top 50 TRB read sequence
CSAREGVGYGYTFG

SEQ ID NO: 1534 - protein, 16 aa, Homo sapiens
  Top 50 TRB read sequence
CASRHIAGEVNEQFFG

SEQ ID NO: 1535 - protein, 16 aa, Homo sapiens
  Top 50 TRB read sequence
CATSRDRQSDTEAFFG

SEQ ID NO: 1536 - protein, 13 aa, Homo sapiens
  Top 50 TRB read sequence
CSARDQTAEAFFG

SEQ ID NO: 1537 - protein, 15 aa, Homo sapiens
  Top 50 TRB read sequence
CASSVAARPYGYTFG

SEQ ID NO: 1538 - protein, 16 aa, Homo sapiens
  Top 50 TRB read sequence
CASSEVREALETPYIL

SEQ ID NO: 1539 - protein, 14 aa, Homo sapiens
  Top 50 TRB read sequence
CASTQNYAQPQHFG

SEQ ID NO: 1540 - protein, 16 aa, Homo sapiens
  Top 50 TRB read sequence
CATSGQGKTYNEQFFG

SEQ ID NO: 1541 - protein, 15 aa, Homo sapiens
  Top 50 TRB read sequence
CASSYTGTGDENCFW

SEQ ID NO: 1542 - protein, 9 aa, Homo sapiens
  Top 50 TRB read sequence
CSPDEAFFG

SEQ ID NO: 1543 - protein, 18 aa, Homo sapiens
  Top 50 TRB read sequence
CASSQDFRSVSGNTIYFG

SEQ ID NO: 1544 - protein, 15 aa, Homo sapiens
  Top 50 TRB read sequence
CASSLAGGVDTQYFG

SEQ ID NO: 1545 - protein, 15 aa, Homo sapiens
  Top 50 TRB read sequence
CASSGTSGRYEQYFG

SEQ ID NO: 1546 - protein, 15 aa, Homo sapiens
  Top 50 TRB read sequence
CSVVSWQVLDKSSSS

SEQ ID NO: 1547 - protein, 15 aa, Homo sapiens
  Top 50 TRB read sequence
CASSRPGQGLTQYFG

SEQ ID NO: 1548 - protein, 15 aa, Homo sapiens
  Top 50 TRB read sequence
  misc_feature (11)..(11): Xaa can be any naturally occurring amino acid
CSVERGGSLGXQYFG

SEQ ID NO: 1549 - protein, 15 aa, Homo sapiens
  Top 50 TRB read sequence
CASSQERGKYEQYFG

SEQ ID NO: 1550 - protein, 13 aa, Homo sapiens
  Duplicated TCRalpha strand read sequence in healthy people
CAVMDSNYQLIWG

SEQ ID NO: 1551 - protein, 13 aa, Homo sapiens
  Duplicated TCRalpha strand read sequence in healthy people
CAVRDGDYKLSFG

SEQ ID NO: 1552 - protein, 14 aa, Homo sapiens
  Duplicated TCRalpha strand read sequence in healthy people
CALSGGSNYKLTFG

SEQ ID NO: 1553 - protein, 13 aa, Homo sapiens
  Duplicated TCRalpha strand read sequence in healthy people
CAENTGGFKTIFG

SEQ ID NO: 1554 - protein, 13 aa, Homo sapiens
  Duplicated TCRalpha strand read sequence in healthy people
CAVRDSNYQLIWG

SEQ ID NO: 1555 - protein, 13 aa, Homo sapiens
  Duplicated TCRalpha strand read sequence in healthy people
CAVMDSSYKLIFG

SEQ ID NO: 1556 - protein, 13 aa, Homo sapiens
  Duplicated TCRalpha strand read sequence in healthy people
CAVTDSNYQLIWG

SEQ ID NO: 1557 - protein, 13 aa, Homo sapiens
  Duplicated TCRalpha strand read sequence in healthy people
CAVLDSNYQLIWG

SEQ ID NO: 1558 - protein, 13 aa, Homo sapiens
  Duplicated TCRalpha strand read sequence in healthy people
CAVRDRDYKLSFG

SEQ ID NO: 1559 - protein, 16 aa, Homo sapiens
  Duplicated TCRalpha strand read sequence in healthy people
CVVSDRGSTLGRLYFG

SEQ ID NO: 1560 - protein, 14 aa, Homo sapiens
  Duplicated TCRalpha strand read sequence in healthy people
CALIYNQGGKLIFG

SEQ ID NO: 1561 - protein, 11 aa, Homo sapiens
  Duplicated TCRalpha strand read sequence in healthy people
CALNDYKLSFG

SEQ ID NO: 1562 - protein, 15 aa, Homo sapiens
  Duplicated TCRalpha strand read sequence in healthy people
CAENSGGSNYKLTFG

SEQ ID NO: 1563 - protein, 13 aa, Homo sapiens
  Duplicated TCRalpha strand read sequence in healthy people
CAENNAGNMLTFG

SEQ ID NO: 1564 - protein, 13 aa, Homo sapiens
  Duplicated TCRalpha strand read sequence in healthy people
CAVNTGFQKLVFG

SEQ ID NO: 1565 - protein, 11 aa, Homo sapiens
  Duplicated TCRalpha strand read sequence in healthy people
CAVNDYKLSFG

SEQ ID NO: 1566 - protein, 11 aa, Homo sapiens
  Duplicated TCRalpha strand read sequence in healthy people
CVVNNARLMFG

SEQ ID NO: 1567 - protein, 13 aa, Homo sapiens
  Duplicated TCRalpha strand read sequence in healthy people
CAVKDSNYQLIWG

SEQ ID NO: 1568 - protein, 13 aa, Homo sapiens
  Duplicated TCRalpha strand read sequence in healthy people
CAAMDSNYQLIWG

SEQ ID NO: 1569 - protein, 13 aa, Homo sapiens
  Duplicated TCRalpha strand read sequence in healthy people
CAALDSNYQLIWG

SEQ ID NO: 1570 - protein, 13 aa, Homo sapiens
  Duplicated TCRalpha strand read sequence in healthy people
CALSGGSYIPTFG

SEQ ID NO: 1571 - protein, 16 aa, Homo sapiens
  Duplicated TCRalpha strand read sequence in healthy people
CALSDYGGSQGNLIFG

SEQ ID NO: 1572 - protein, 13 aa, Homo sapiens
  Duplicated TCRalpha strand read sequence in healthy people
CALIGFGNVLHCG

SEQ ID NO: 1573 - protein, 15 aa, Homo sapiens
  Duplicated TCRalpha strand read sequence in healthy people
CAVEEGTGGFKTIFG

SEQ ID NO: 1574 - protein, 14 aa, Homo sapiens
  Duplicated TCRalpha strand read sequence in healthy people
CAENTGTASKLTFG

SEQ ID NO: 1575 - protein, 14 aa, Homo sapiens
  Duplicated TCRalpha strand read sequence in healthy people
CAASGGSNYKLTFG

SEQ ID NO: 1576 - protein, 13 aa, Homo sapiens
  Duplicated TCRalpha strand read sequence in healthy people
CAVSGGSYIPTFG

SEQ ID NO: 1577 - protein, 12 aa, Homo sapiens
  Duplicated TCRalpha strand read sequence in healthy people
CAVNRDDKIIFG

SEQ ID NO: 1578 - protein, 13 aa, Homo sapiens
  Duplicated TCRalpha strand read sequence in healthy people
CAVNQAGTALIFG

SEQ ID NO: 1579 - protein, 14 aa, Homo sapiens
  Duplicated TCRalpha strand read sequence in healthy people
CAVNNQAGTALIFG

SEQ ID NO: 1580 - protein, 12 aa, Homo sapiens
  Duplicated TCRalpha strand read sequence in healthy people
CVVNTGNQFYFG

SEQ ID NO: 1581 - protein, 13 aa, Homo sapiens
  Duplicated TCRalpha strand read sequence in healthy people
CVVNQAGTALIFG

SEQ ID NO: 1582 - protein, 13 aa, Homo sapiens
  Duplicated TCRalpha strand read sequence in healthy people
CAVVDSNYQLIWG

SEQ ID NO: 1583 - protein, 13 aa, Homo sapiens
  Duplicated TCRalpha strand read sequence in healthy people
CAVSDSNYQLIWG

SEQ ID NO: 1584 - protein, 13 aa, Homo sapiens
  Duplicated TCRalpha strand read sequence in healthy people
CASMDSNYQLIWG

SEQ ID NO: 1585 - protein, 13 aa, Homo sapiens
  Duplicated TCRalpha strand read sequence in healthy people
CAPMDSNYQLIWG

SEQ ID NO: 1586 - protein, 13 aa, Homo sapiens
  Duplicated TCRalpha strand read sequence in healthy people
CAVRDSSYKLIFG

SEQ ID NO: 1587 - protein, 13 aa, Homo sapiens
  Duplicated TCRalpha strand read sequence in healthy people
CAVLDSSYKLIFG

SEQ ID NO: 1588 - protein, 14 aa, Homo sapiens
  Duplicated TCRbeta strand read sequence in healthy people
CASSVLRGGDPSTS

SEQ ID NO: 1589 - protein, 15 aa, Homo sapiens
  Duplicated TCRbeta strand read sequence in healthy people
CASSGEVGRETQYFG

SEQ ID NO: 1590 - protein, 14 aa, Homo sapiens
  Duplicated TCRbeta strand read sequence in healthy people
CASSYWGTGELFFG

SEQ ID NO: 1591 - protein, 13 aa, Homo sapiens
  Duplicated TCRbeta strand read sequence in healthy people
CASSYWGPGSCFL

SEQ ID NO: 1592 - protein, 15 aa, Homo sapiens
  Duplicated TCRbeta strand read sequence in healthy people
  misc_feature (1)..(1): Xaa can be any naturally occurring amino acid
XASSVGTKDQPQHFG

SEQ ID NO: 1593 - protein, 15 aa, Homo sapiens
  Duplicated TCRbeta strand read sequence in healthy people
  misc_feature (4)..(4): Xaa can be any naturally occurring amino acid
CASXVATWTGTATPS

SEQ ID NO: 1594 - protein, 16 aa, Homo sapiens
  Duplicated TCRbeta strand read sequence in healthy people
CASSVATLDRDGYTFG

SEQ ID NO: 1595 - protein, 14 aa, Homo sapiens
  Duplicated TCRbeta strand read sequence in healthy people
CASTQSTGLRVLLR

SEQ ID NO: 1596 - protein, 15 aa, Homo sapiens
  Duplicated TCRbeta strand read sequence in healthy people
CASSYRAATYEQYFG

SEQ ID NO: 1597 - protein, 17 aa, Homo sapiens
  Duplicated TCRbeta strand read sequence in healthy people
CASSLGLAGARYEQYFG

SEQ ID NO: 1598 - protein, 14 aa, Homo sapiens
  Duplicated TCRbeta strand read sequence in healthy people
CASSFRDSYEQYFG

SEQ ID NO: 1599 - protein, 15 aa, Homo sapiens
  Duplicated TCRbeta strand read sequence in healthy people
CASTGAPGANVLTFG

SEQ ID NO: 1600 - protein, 17 aa, Homo sapiens
  Duplicated TCRbeta strand read sequence in healthy people
CASSFPVPSGANVLTFG

SEQ ID NO: 1601 - protein, 19 aa, Homo sapiens
  Duplicated TCRbeta strand read sequence in healthy people
CASRAEHGSRRRGQRPDFR

SEQ ID NO: 1602 - protein, 13 aa, Homo sapiens
  Duplicated TCRbeta strand read sequence in healthy people
CASSLVGETQYFG

SEQ ID NO: 1603 - protein, 17 aa, Homo sapiens
  Duplicated TCRbeta strand read sequence in healthy people
CASSLGTSGSRNEQFFG

SEQ ID NO: 1604 - protein, 14 aa, Homo sapiens
  Duplicated TCRbeta strand read sequence in healthy people
CASSDSTTDTQYFG

SEQ ID NO: 1605 - protein, 16 aa, Homo sapiens
  Duplicated TCRbeta strand read sequence in healthy people
CASSDGTGGTDTQYFG

SEQ ID NO: 1606 - protein, 14 aa, Homo sapiens
  Duplicated TCRbeta strand read sequence in healthy people
CASSQGQGETQYFG

SEQ ID NO: 1607 - protein, 13 aa, Homo sapiens
  Duplicated TCRbeta strand read sequence in healthy people
CSVGQGPNEQYFG

SEQ ID NO: 1608 - protein, 14 aa, Homo sapiens
  Duplicated TCRbeta strand read sequence in healthy people
CSVAGTGAYEQYFG

SEQ ID NO: 1609 - protein, 12 aa, Homo sapiens
  Duplicated TCRbeta strand read sequence in healthy people
CSVAASYEQYFG

SEQ ID NO: 1610 - protein, 11 aa, Homo sapiens
  Duplicated TCRbeta strand read sequence in healthy people
CSVERETQYFG

SEQ ID NO: 1611 - protein, 12 aa, Homo sapiens
  Duplicated TCRbeta strand read sequence in healthy people
CSVDSKETQYFG

SEQ ID NO: 1612 - protein, 13 aa, Homo sapiens
  Duplicated TCRbeta strand read sequence in healthy people
CSVEGSTDTQYFG

SEQ ID NO: 1613 - protein, 13 aa, Homo sapiens
  Duplicated TCRbeta strand read sequence in healthy people
CSVEEGTDTQYFG

SEQ ID NO: 1614 - protein, 12 aa, Homo sapiens
  Duplicated TCRbeta strand read sequence in healthy people
CSVVGTGELFFG

SEQ ID NO: 1615 - protein, 15 aa, Homo sapiens
  Duplicated TCRbeta strand read sequence in healthy people
CSVAGTSGYNEQFFG

SEQ ID NO: 1616 - protein, 12 aa, Homo sapiens
  Duplicated TCRbeta strand read sequence in healthy people
CSVGTGNTIYFG

SEQ ID NO: 1617 - protein, 13 aa, Homo sapiens
  Duplicated TCRbeta strand read sequence in healthy people
CSVRGGNYGYTFG

SEQ ID NO: 1618 - protein, 13 aa, Homo sapiens
  Duplicated TCRbeta strand read sequence in healthy people
CSVGSGSYGYTFG

SEQ ID NO: 1619 - protein, 12 aa, Homo sapiens
  Duplicated TCRbeta strand read sequence in healthy people
CASSPSYEQYFG

SEQ ID NO: 1620 - protein, 14 aa, Homo sapiens
  Duplicated TCRbeta strand read sequence in healthy people
CASSLRGQETQYFG

SEQ ID NO: 1621 - protein, 12 aa, Homo sapiens
  Duplicated TCRbeta strand read sequence in healthy people
CASSLRETQYFG

SEQ ID NO: 1622 - protein, 13 aa, Homo sapiens
  Duplicated TCRbeta strand read sequence in healthy people
CASSLLTGELFFG

SEQ ID NO: 1623 - protein, 15 aa, Homo sapiens
  Duplicated TCRbeta strand read sequence in healthy people
CSASGTSVSYEQYFG

SEQ ID NO: 1624 - protein, 11 aa, Homo sapiens
  Duplicated TCRbeta strand read sequence in healthy people
CASSDNEQFFG

SEQ ID NO: 1625 - protein, 14 aa, Homo sapiens
  Duplicated TCRbeta strand read sequence in healthy people
CATSRDLGETQYFG

SEQ ID NO: 1626 - protein, 14 aa, Homo sapiens
  Duplicated TCRbeta strand read sequence in healthy people
CASSLAGNTEAFFG

SEQ ID NO: 1627 - protein, 14 aa, Homo sapiens
  Invariant TCR candidate gene sequence
CALSGGSNYKLTFG

SEQ ID NO: 1628 - protein, 13 aa, Homo sapiens
  Invariant TCR candidate gene sequence
CAENTGGFKTIFG

SEQ ID NO: 1629 - protein, 14 aa, Homo sapiens
  Invariant TCR candidate gene sequence
CALIYNQGGKLIFG

SEQ ID NO: 1630 - protein, 11 aa, Homo sapiens
  Invariant TCR candidate gene sequence
CALNDYKLSFG

SEQ ID NO: 1631 - protein, 15 aa, Homo sapiens
  Invariant TCR candidate gene sequence
CAENSGGSNYKLTFG

SEQ ID NO: 1632 - protein, 13 aa, Homo sapiens
  Invariant TCR candidate gene sequence
CAENNAGNMLTFG

SEQ ID NO: 1633 - protein, 13 aa, Homo sapiens
  Invariant TCR candidate gene sequence
CAVNTGFQKLVFG

SEQ ID NO: 1634 - protein, 11 aa, Homo sapiens
  Invariant TCR candidate gene sequence
CAVNDYKLSFG

SEQ ID NO: 1635 - protein, 11 aa, Homo sapiens
  Invariant TCR candidate gene sequence
CVVNNARLMFG

SEQ ID NO: 1636 - protein, 13 aa, Homo sapiens
  Invariant TCR candidate gene sequence
CALSGGSYIPTFG

SEQ ID NO: 1637 - protein, 16 aa, Homo sapiens
  Invariant TCR candidate gene sequence
CALSDYGGSQGNLIFG

SEQ ID NO: 1638 - protein, 13 aa, Homo sapiens
  Invariant TCR candidate gene sequence
CALIGFGNVLHCG

SEQ ID NO: 1639 - protein, 15 aa, Homo sapiens
  Invariant TCR candidate gene sequence
CAVEEGTGGFKTIFG

SEQ ID NO: 1640 - protein, 14 aa, Homo sapiens
  Invariant TCR candidate gene sequence
CAENTGTASKLTFG

SEQ ID NO: 1641 - protein, 14 aa, Homo sapiens
  Invariant TCR candidate gene sequence
CAASGGSNYKLTFG

SEQ ID NO: 1642 - protein, 13 aa, Homo sapiens
  Invariant TCR candidate gene sequence
CAVSGGSYIPTFG

SEQ ID NO: 1643 - protein, 12 aa, Homo sapiens
  Invariant TCR candidate gene sequence
CAVNRDDKIIFG

SEQ ID NO: 1644 - protein, 13 aa, Homo sapiens
  Invariant TCR candidate gene sequence
CAVNQAGTALIFG

SEQ ID NO: 1645 - protein, 14 aa, Homo sapiens
  Invariant TCR candidate gene sequence
CAVNNQAGTALIFG

SEQ ID NO: 1646 - protein, 12 aa, Homo sapiens
  Invariant TCR candidate gene sequence
CVVNTGNQFYFG

SEQ ID NO: 1647 - protein, 13 aa, Homo sapiens
  Invariant TCR candidate gene sequence
CVVNQAGTALIFG

SEQ ID NO: 1648 - protein, 13 aa, Homo sapiens
  Duplicated TCRalpha strand read sequence and cancer-specific TCRalpha read sequence in cancer patients
CAVMDSNYQLIWG

SEQ ID NO: 1649 - protein, 13 aa, Homo sapiens
  Duplicated TCRalpha strand read sequence and cancer-specific TCRalpha read sequence in cancer patients
CAVRDSNYQLIWG

SEQ ID NO: 1650 - protein, 13 aa, Homo sapiens
  Duplicated TCRalpha strand read sequence and cancer-specific TCRalpha read sequence in cancer patients
CAVLDSNYQLIWG

SEQ ID NO: 1651 - protein, 13 aa, Homo sapiens
  Duplicated TCRalpha strand read sequence and cancer-specific TCRalpha read sequence in cancer patients
CAVRDGDYKLSFG

SEQ ID NO: 1652 - protein, 13 aa, Homo sapiens
  Duplicated TCRalpha strand read sequence and cancer-specific TCRalpha read sequence in cancer patients
CAASKGGQKLLFA

SEQ ID NO: 1653 - protein, 13 aa, Homo sapiens
  Duplicated TCRalpha strand read sequence and cancer-specific TCRalpha read sequence in cancer patients
CAVKDSNYQLIWG

SEQ ID NO: 1654 - protein, 13 aa, Homo sapiens
  Duplicated TCRalpha strand read sequence and cancer-specific TCRalpha read sequence in cancer patients
CAAMDSNYQLIWG

SEQ ID NO: 1655 - protein, 14 aa, Homo sapiens
  Duplicated TCRalpha strand read sequence and cancer-specific TCRalpha read sequence in cancer patients
CALTQGGSEKLVFG

SEQ ID NO: 1656 - protein, 15 aa, Homo sapiens
  Duplicated TCRalpha strand read sequence and cancer-specific TCRalpha read sequence in cancer patients
CALSDQTGANNLFFG

SEQ ID NO: 1657 - protein, 14 aa, Homo sapiens
  Duplicated TCRalpha strand read sequence and cancer-specific TCRalpha read sequence in cancer patients
CALRKVRHRQAHLW

SEQ ID NO: 1658 - protein, 14 aa, Homo sapiens
  Duplicated TCRalpha strand read sequence and cancer-specific TCRalpha read sequence in cancer patients
CALRGYNFNKFYFG

SEQ ID NO: 1659 - protein, 11 aa, Homo sapiens
  Duplicated TCRalpha strand read sequence and cancer-specific TCRalpha read sequence in cancer patients
CALNDYKLSFG

SEQ ID NO: 1660 - protein, 16 aa, Homo sapiens
  Duplicated TCRalpha strand read sequence and cancer-specific TCRalpha read sequence in cancer patients
CLVGDRDTGRRALTFG

SEQ ID NO: 1661 - protein, 17 aa, Homo sapiens
  Duplicated TCRalpha strand read sequence and cancer-specific TCRalpha read sequence in cancer patients
CAYRSYSGGGADGLTFG

SEQ ID NO: 1662 - protein, 12 aa, Homo sapiens
  Duplicated TCRalpha strand read sequence and cancer-specific TCRalpha read sequence in cancer patients
CAVSGNTPLVFG

SEQ ID NO: 1663 - protein, 11 aa, Homo sapiens
  Duplicated TCRalpha strand read sequence and cancer-specific TCRalpha read sequence in cancer patients
CAVYGQNFVFG

SEQ ID NO: 1664 - protein, 16 aa, Homo sapiens
  Duplicated TCRalpha strand read sequence and cancer-specific TCRalpha read sequence in cancer patients
CAERVSSGSARQLTFG

SEQ ID NO: 1665 - protein, 13 aa, Homo sapiens
  Duplicated TCRalpha strand read sequence and cancer-specific TCRalpha read sequence in cancer patients
CAMNSGYSTLTFG

SEQ ID NO: 1666 - protein, 13 aa, Homo sapiens
  Duplicated TCRalpha strand read sequence and cancer-specific TCRalpha read sequence in cancer patients
CAALDSNYQLIWG

SEQ ID NO: 1667 - protein, 13 aa, Homo sapiens
  Duplicated TCRalpha strand read sequence and cancer-specific TCRalpha read sequence in cancer patients
CAVMDSSYKLIFG

SEQ ID NO: 1668 - protein, 16 aa, Homo sapiens
  Duplicated TCRalpha strand read sequence and cancer-specific TCRalpha read sequence in cancer patients
CVVSDRGSTLGRLYFG

SEQ ID NO: 1669 - protein, 15 aa, Homo sapiens
  Duplicated TCRalpha strand read sequence and cancer-specific TCRalpha read sequence in cancer patients
CALSLSGGSYIPTFG

SEQ ID NO: 1670 - protein, 14 aa, Homo sapiens
  Duplicated TCRalpha strand read sequence and cancer-specific TCRalpha read sequence in cancer patients
CALSDRGAQKLVFG

SEQ ID NO: 1671 - protein, 14 aa, Homo sapiens
  Duplicated TCRalpha strand read sequence and cancer-specific TCRalpha read sequence in cancer patients
CALIIGREPRSWYL

SEQ ID NO: 1672 - protein, 15 aa, Homo sapiens
  Duplicated TCRalpha strand read sequence and cancer-specific TCRalpha read sequence in cancer patients
CALIIGEGAQKLVFG

SEQ ID NO: 1673 - protein, 16 aa, Homo sapiens
  Duplicated TCRalpha strand read sequence and cancer-specific TCRalpha read sequence in cancer patients
CALSGSGGSNYKLTFG

SEQ ID NO: 1674 - protein, 17 aa, Homo sapiens
  Duplicated TCRalpha strand read sequence and cancer-specific TCRalpha read sequence in cancer patients
CALSDLSGGSNYKLTFG

SEQ ID NO: 1675 - protein, 16 aa, Homo sapiens
  Duplicated TCRalpha strand read sequence and cancer-specific TCRalpha read sequence in cancer patients
CALRAGGTSYGKLTFG

SEQ ID NO: 1676 - protein, 15 aa, Homo sapiens
  Duplicated TCRalpha strand read sequence and cancer-specific TCRalpha read sequence in cancer patients
CALTLTMGRRALTFG

SEQ ID NO: 1677 - protein, 13 aa, Homo sapiens
  Duplicated TCRalpha strand read sequence and cancer-specific TCRalpha read sequence in cancer patients
CALDFGNEKLTFG

SEQ ID NO: 1678 - protein, 11 aa, Homo sapiens
  Duplicated TCRalpha strand read sequence and cancer-specific TCRalpha read sequence in cancer patients
CAPPPHGLTFG

SEQ ID NO: 1679 - protein, 16 aa, Homo sapiens
  Duplicated TCRalpha strand read sequence and cancer-specific TCRalpha read sequence in cancer patients
CALSYSGGGADGLTFG

SEQ ID NO: 1680 - protein, 14 aa, Homo sapiens
  Duplicated TCRalpha strand read sequence and cancer-specific TCRalpha read sequence in cancer patients
CALRGGGADGLTFG

SEQ ID NO: 1681 - protein, 14 aa, Homo sapiens
  Duplicated TCRalpha strand read sequence and cancer-specific TCRalpha read sequence in cancer patients
CALNTGTASKLTFG

SEQ ID NO: 1682 - protein, 13 aa, Homo sapiens
  Duplicated TCRalpha strand read sequence and cancer-specific TCRalpha read sequence in cancer patients
CALSDRNNDMRFG

SEQ ID NO: 1683 - protein, 12 aa, Homo sapiens
  Duplicated TCRalpha strand read sequence and cancer-specific TCRalpha read sequence in cancer patients
CALRAGNMLTFG

SEQ ID NO: 1684 - protein, 14 aa, Homo sapiens
  Duplicated TCRalpha strand read sequence and cancer-specific TCRalpha read sequence in cancer patients
CALLNNAGNMLTFG

SEQ ID NO: 1685 - protein, 13 aa, Homo sapiens
  Duplicated TCRalpha strand read sequence and cancer-specific TCRalpha read sequence in cancer patients
CALSSNTGKLIFG

SEQ ID NO: 1686 - protein, 13 aa, Homo sapiens
  Duplicated TCRalpha strand read sequence and cancer-specific TCRalpha read sequence in cancer patients
CALSDNTDKLIFG

SEQ ID NO: 1687 - protein, 12 aa, Homo sapiens
  Duplicated TCRalpha strand read sequence and cancer-specific TCRalpha read sequence in cancer patients
CALIDTDKLIFG

SEQ ID NO: 1688 - protein, 14 aa, Homo sapiens
  Duplicated TCRalpha strand read sequence and cancer-specific TCRalpha read sequence in cancer patients
CALSGGATNKLIFG

SEQ ID NO: 1689 - protein, 12 aa, Homo sapiens
  Duplicated TCRalpha strand read sequence and cancer-specific TCRalpha read sequence in cancer patients
CALTSNARLMFG

SEQ ID NO: 1690 - protein, 12 aa, Homo sapiens
  Duplicated TCRalpha strand read sequence and cancer-specific TCRalpha read sequence in cancer patients
CALNNNARLMFG

SEQ ID NO: 1691 - protein, 15 aa, Homo sapiens
  Duplicated TCRalpha strand read sequence and cancer-specific TCRalpha read sequence in cancer patients
CALSSYSSASKIIFG

SEQ ID NO: 1692 - protein, 14 aa, Homo sapiens
  Duplicated TCRalpha strand read sequence and cancer-specific TCRalpha read sequence in cancer patients
CALSHSSASKIIFG

SEQ ID NO: 1693 - protein, 16 aa, Homo sapiens
  Duplicated TCRalpha strand read sequence and cancer-specific TCRalpha read sequence in cancer patients
CALSDRRSSASKIIFG

SEQ ID NO: 1694 - protein, 14 aa, Homo sapiens
  Duplicated TCRalpha strand read sequence and cancer-specific TCRalpha read sequence in cancer patients
CALRDSSASKIIFG

SEQ ID NO: 1695 - protein, 13 aa, Homo sapiens
  Duplicated TCRalpha strand read sequence and cancer-specific TCRalpha read sequence in cancer patients
CALVSGNTPLVFG

SEQ ID NO: 1696 - protein, 14 aa, Homo sapiens
  Duplicated TCRalpha strand read sequence and cancer-specific TCRalpha read sequence in cancer patients
CALRGSGNTPLVFG

SEQ ID NO: 1697 - protein, 16 aa, Homo sapiens
  Duplicated TCRalpha strand read sequence and cancer-specific TCRalpha read sequence in cancer patients
CALSDRDTNAGKSTFG

SEQ ID NO: 1698 - protein, 13 aa, Homo sapiens
  Duplicated TCRalpha strand read sequence and cancer-specific TCRalpha read sequence in cancer patients
CALNTNAGKSTFG

SEQ ID NO: 1699 - protein, 15 aa, Homo sapiens
  Duplicated TCRalpha strand read sequence and cancer-specific TCRalpha read sequence in cancer patients
CALSFYNQGGKLIFG

SEQ ID NO: 1700 - protein, 15 aa, Homo sapiens
  Duplicated TCRalpha strand read sequence and cancer-specific TCRalpha read sequence in cancer patients
CALSDYNQGGKLIFG

SEQ ID NO: 1701 - protein, 15 aa, Homo sapiens
  Duplicated TCRalpha strand read sequence and cancer-specific TCRalpha read sequence in cancer patients
CALPIYNQGGKLIFG

SEQ ID NO: 1702 - protein, 13 aa, Homo sapiens
  Duplicated TCRalpha strand read sequence and cancer-specific TCRalpha read sequence in cancer patients
CALAGSARQLTFG

SEQ ID NO: 1703 - protein, 13 aa, Homo sapiens
  Duplicated TCRalpha strand read sequence and cancer-specific TCRalpha read sequence in cancer patients
CAPRYNFNKFYFG

SEQ ID NO: 1704 - protein, 13 aa, Homo sapiens
  Duplicated TCRalpha strand read sequence and cancer-specific TCRalpha read sequence in cancer patients
CALSGDDYKLSFG

SEQ ID NO: 1705 - protein, 15 aa, Homo sapiens
  Duplicated TCRalpha strand read sequence and cancer-specific TCRalpha read sequence in cancer patients
CALSDKAAGNKLTFG

SEQ ID NO: 1706 - protein, 14 aa, Homo sapiens
  Duplicated TCRalpha strand read sequence and cancer-specific TCRalpha read sequence in cancer patients
CALFKAAGNKLTFG

SEQ ID NO: 1707 - protein, 14 aa, Homo sapiens
  Duplicated TCRalpha strand read sequence and cancer-specific TCRalpha read sequence in cancer patients
CALSDRDGQKLLFA

SEQ ID NO: 1708 - protein, 14 aa, Homo sapiens
  Duplicated TCRalpha strand read sequence and cancer-specific TCRalpha read sequence in cancer patients
CALSGQAGTALIFG

SEQ ID NO: 1709 - protein, 15 aa, Homo sapiens
  Duplicated TCRalpha strand read sequence and cancer-specific TCRalpha read sequence in cancer patients
CALSAVEAGTALIFG

SEQ ID NO: 1710 - protein, 15 aa, Homo sapiens
  Duplicated TCRalpha strand read sequence and cancer-specific TCRalpha read sequence in cancer patients
CALTPSGGYQKVTFG

SEQ ID NO: 1711 - protein, 15 aa, Homo sapiens
  Duplicated TCRalpha strand read sequence and cancer-specific TCRalpha read sequence in cancer patients
CALGGAGGGNKLTFG

SEQ ID NO: 1712 - protein, 17 aa, Homo sapiens
  Duplicated TCRalpha strand read sequence and cancer-specific TCRalpha read sequence in cancer patients
CAVVIETTGTASKLTFG

SEQ ID NO: 1713 - protein, 14 aa, Homo sapiens
  Duplicated TCRalpha strand read sequence and cancer-specific TCRalpha read sequence in cancer patients
CAVGALNNNDMRFG

SEQ ID NO: 1714 - protein, 14 aa, Homo sapiens
  Duplicated TCRalpha strand read sequence and cancer-specific TCRalpha read sequence in cancer patients
CAVGAAAGNKLTFG

SEQ ID NO: 1715 - protein, 15 aa, Homo sapiens
  Duplicated TCRalpha strand read sequence and cancer-specific TCRalpha read sequence in cancer patients
CVVSLSGGYNKLILE

SEQ ID NO: 1716 - protein, 14 aa, Homo sapiens
  Duplicated TCRalpha strand read sequence and cancer-specific TCRalpha read sequence in cancer patients
CAVQWWCYNKLIFG

SEQ ID NO: 1717 - protein, 15 aa, Homo sapiens
  Duplicated TCRalpha strand read sequence and cancer-specific TCRalpha read sequence in cancer patients
CALGSDGGSYIPTFG

SEQ ID NO: 1718 - protein, 15 aa, Homo sapiens
  Duplicated TCRalpha strand read sequence and cancer-specific TCRalpha read sequence in cancer patients
CALDISGNTGKLIFG

SEQ ID NO: 1719 - protein, 12 aa, Homo sapiens
  Duplicated TCRalpha strand read sequence and cancer-specific TCRalpha read sequence in cancer patients
CALGRFRQAHLW

SEQ ID NO: 1720 - protein, 19 aa, Homo sapiens
  Duplicated TCRalpha strand read sequence and cancer-specific TCRalpha read sequence in cancer patients
CAESRLTLYGHGQESTYFW

SEQ ID NO: 1721 - protein, 14 aa, Homo sapiens
  Duplicated TCRalpha strand read sequence and cancer-specific TCRalpha read sequence in cancer patients
CAERDTGRRALTFG

SEQ ID NO: 1722 - protein, 15 aa, Homo sapiens
  Duplicated TCRalpha strand read sequence and cancer-specific TCRalpha read sequence in cancer patients
CAESKRTGANNLFFG

SEQ ID NO: 1723 - protein, 12 aa, Homo sapiens
  Duplicated TCRalpha strand read sequence and cancer-specific TCRalpha read sequence in cancer patients
CLVGVEASKLSL

SEQ ID NO: 1724 - protein, 15 aa, Homo sapiens
  Duplicated TCRalpha strand read sequence and cancer-specific TCRalpha read sequence in cancer patients
CLVGTTSGTYKYIFG

SEQ ID NO: 1725 - protein, 15 aa, Homo sapiens
  Duplicated TCRalpha strand read sequence and cancer-specific TCRalpha read sequence in cancer patients
CLVGDTSNTGKLIFG

SEQ ID NO: 1726 - protein, 13 aa, Homo sapiens
  Duplicated TCRalpha strand read sequence and cancer-specific TCRalpha read sequence in cancer patients
CLDTSNTGKLIFG

SEQ ID NO: 1727 - protein, 13 aa, Homo sapiens
  Duplicated TCRalpha strand read sequence and cancer-specific TCRalpha read sequence in cancer patients
CLLTGSARQLTFG

SEQ ID NO: 1728 - protein, 17 aa, Homo sapiens
  Duplicated TCRalpha strand read sequence and cancer-specific TCRalpha read sequence in cancer patients
CAYRSGYGGATNKLIFG

SEQ ID NO: 1729 - protein, 15 aa, Homo sapiens
  Duplicated TCRalpha strand read sequence and cancer-specific TCRalpha read sequence in cancer patients
CAYRRRNNNARLMFG

SEQ ID NO: 1730 - protein, 17 aa, Homo sapiens
  Duplicated TCRalpha strand read sequence and cancer-specific TCRalpha read sequence in cancer patients
CAFMKHDWDSNYQLIWG

SEQ ID NO: 1731 - protein, 16 aa, Homo sapiens
  Duplicated TCRalpha strand read sequence and cancer-specific TCRalpha read sequence in cancer patients
CAFMTPGGATNKLIFG

SEQ ID NO: 1732 - protein, 13 aa, Homo sapiens
  Duplicated TCRalpha strand read sequence and cancer-specific TCRalpha read sequence in cancer patients
CAAIQGAQKLVFG

SEQ ID NO: 1733 - protein, 15 aa, Homo sapiens
  Duplicated TCRalpha strand read sequence and cancer-specific TCRalpha read sequence in cancer patients
CAGRPETSGSRLTFG

SEQ ID NO: 1734 - protein, 15 aa, Homo sapiens
  Duplicated TCRalpha strand read sequence and cancer-specific TCRalpha read sequence in cancer patients
CAGQGGGSNYKLTFG

SEQ ID NO: 1735 - protein, 16 aa, Homo sapiens
  Duplicated TCRalpha strand read sequence and cancer-specific TCRalpha read sequence in cancer patients
CAGQESGAGSYQLTFG

SEQ ID NO: 1736 - protein, 14 aa, Homo sapiens
  Duplicated TCRalpha strand read sequence and cancer-specific TCRalpha read sequence in cancer patients
CAGPDNYGQNFVFG

SEQ ID NO: 1737 - protein, 18 aa, Homo sapiens
  Duplicated TCRalpha strand read sequence and cancer-specific TCRalpha read sequence in cancer patients
CAVRDMRYGGSQGNLIFG

SEQ ID NO: 1738 - protein, 15 aa, Homo sapiens
  Duplicated TCRalpha strand read sequence and cancer-specific TCRalpha read sequence in cancer patients
CAVRDSGGYNKLYFW

SEQ ID NO: 1739 - protein, 15 aa, Homo sapiens
  Duplicated TCRalpha strand read sequence and cancer-specific TCRalpha read sequence in cancer patients
CAVRDSGGYNKLIFG

SEQ ID NO: 1740 - protein, 16 aa, Homo sapiens
  Duplicated TCRalpha strand read sequence and cancer-specific TCRalpha read sequence in cancer patients
CAVRAVNSGNTPLVFG

SEQ ID NO: 1741 - protein, 14 aa, Homo sapiens
  Duplicated TCRalpha strand read sequence and cancer-specific TCRalpha read sequence in cancer patients
CAASDSGTYKYIFG

SEQ ID NO: 1742 - protein, 13 aa, Homo sapiens
  Duplicated TCRalpha strand read sequence and cancer-specific TCRalpha read sequence in cancer patients
CAATEGNTPLVFG

SEQ ID NO: 1743 - protein, 14 aa, Homo sapiens
  Duplicated TCRalpha strand read sequence and cancer-specific TCRalpha read sequence in cancer patients
CTNPLGGNNRLAFG

SEQ ID NO: 1744 - protein, 16 aa, Homo sapiens
  Duplicated TCRalpha strand read sequence and cancer-specific TCRalpha read sequence in cancer patients
CILRDNTGTASKLTFG

SEQ ID NO: 1745 - protein, 13 aa, Homo sapiens
  Duplicated TCRalpha strand read sequence and cancer-specific TCRalpha read sequence in cancer patients
CILGGVWECAALR

SEQ ID NO: 1746 - protein, 13 aa, Homo sapiens
  Duplicated TCRalpha strand read sequence and cancer-specific TCRalpha read sequence in cancer patients
CILGGFGNVLHCG

SEQ ID NO: 1747 - protein, 13 aa, Homo sapiens
  Duplicated TCRalpha strand read sequence and cancer-specific TCRalpha read sequence in cancer patients
CILRVVLQTSSSL

SEQ ID NO: 1748 - protein, 16 aa, Homo sapiens
  Duplicated TCRalpha strand read sequence and cancer-specific TCRalpha read sequence in cancer patients
CILRDGHNQGGKLIFG

SEQ ID NO: 1749 - protein, 13 aa, Homo sapiens
  Duplicated TCRalpha strand read sequence and cancer-specific TCRalpha read sequence in cancer patients
CILMNNFNKFTLD

SEQ ID NO: 1750 - protein, 15 aa, Homo sapiens
  Duplicated TCRalpha strand read sequence and cancer-specific TCRalpha read sequence in cancer patients
CILTQRLNSGRLYFG

SEQ ID NO: 1751 - protein, 15 aa, Homo sapiens
  Duplicated TCRalpha strand read sequence and cancer-specific TCRalpha read sequence in cancer patients
CILTQRLNSGEAILW

SEQ ID NO: 1752 - protein, 16 aa, Homo sapiens
  Duplicated TCRalpha strand read sequence and cancer-specific TCRalpha read sequence in cancer patients
CIVRVAQGGSEKLVFG

SEQ ID NO: 1753 - protein, 18 aa, Homo sapiens
  Duplicated TCRalpha strand read sequence and cancer-specific TCRalpha read sequence in cancer patients
CIVRVSAGGTSYGKLTFG

SEQ ID NO: 1754 - protein, 15 aa, Homo sapiens
  Duplicated TCRalpha strand read sequence and cancer-specific TCRalpha read sequence in cancer patients
CIVTAYTGRRALTLG

SEQ ID NO: 1755 - protein, 15 aa, Homo sapiens
  Duplicated TCRalpha strand read sequence and cancer-specific TCRalpha read sequence in cancer patients
CIVTAYTGRRALTFG

SEQ ID NO: 1756 - protein, 15 aa, Homo sapiens
  Duplicated TCRalpha strand read sequence and cancer-specific TCRalpha read sequence in cancer patients
CIVRVPNTGNQFYFG

SEQ ID NO: 1757 - protein, 16 aa, Homo sapiens
  Duplicated TCRalpha strand read sequence and cancer-specific TCRalpha read sequence in cancer patients
CIVRADTGTASKLTFG

SEQ ID NO: 1758 - protein, 14 aa, Homo sapiens
  Duplicated TCRalpha strand read sequence and cancer-specific TCRalpha read sequence in cancer patients
CIVRVDNTDKLIFG

SEQ ID NO: 1759 - protein, 14 aa, Homo sapiens
  Duplicated TCRalpha strand read sequence and cancer-specific TCRalpha read sequence in cancer patients
CAGSLRGYQKVTFG

SEQ ID NO: 1760 - protein, 13 aa, Homo sapiens
  Duplicated TCRalpha strand read sequence and cancer-specific TCRalpha read sequence in cancer patients
CAGMDSSYKLIFG

SEQ ID NO: 1761 - protein, 14 aa, Homo sapiens
  Duplicated TCRalpha strand read sequence and cancer-specific TCRalpha read sequence in cancer patients
CAVGNTGGFKTIFG

SEQ ID NO: 1762 - protein, 13 aa, Homo sapiens
  Duplicated TCRalpha strand read sequence and cancer-specific TCRalpha read sequence in cancer patients
CAVKGGSYIPTFG

SEQ ID NO: 1763 - protein, 14 aa, Homo sapiens
  Duplicated TCRalpha strand read sequence and cancer-specific TCRalpha read sequence in cancer patients
CAVNHFGNEKLTFG

SEQ ID NO: 1764 - protein, 14 aa, Homo sapiens
  Duplicated TCRalpha strand read sequence and cancer-specific TCRalpha read sequence in cancer patients
CAVSTGTASKLTFG

SEQ ID NO: 1765 - protein, 15 aa, Homo sapiens
  Duplicated TCRalpha strand read sequence and cancer-specific TCRalpha read sequence in cancer patients
CAVRGTGTASKLTFG

SEQ ID NO: 1766 - protein, 14 aa, Homo sapiens
  Duplicated TCRalpha strand read sequence and cancer-specific TCRalpha read sequence in cancer patients
CAVARGSGYALNFG

SEQ ID NO: 1767 - protein, 13 aa, Homo sapiens
  Duplicated TCRalpha strand read sequence and cancer-specific TCRalpha read sequence in cancer patients
CAVNSGNTPLVFG

SEQ ID NO: 1768 - protein, 12 aa, Homo sapiens
  Duplicated TCRalpha strand read sequence and cancer-specific TCRalpha read sequence in cancer patients
CAVNYGQNFVFG

SEQ ID NO: 1769 - protein, 14 aa, Homo sapiens
  Duplicated TCRalpha strand read sequence and cancer-specific TCRalpha read sequence in cancer patients
CAVPFWFCKATDLW

SEQ ID NO: 1770 - protein, 14 aa, Homo sapiens
  Duplicated TCRalpha strand read sequence and cancer-specific TCRalpha read sequence in cancer patients
CAVGSGGGNKLTFG

SEQ ID NO: 1771 - protein, 13 aa, Homo sapiens
  Duplicated TCRalpha strand read sequence and cancer-specific TCRalpha read sequence in cancer patients
CAVQGGSEKLVFG

SEQ ID NO: 1772 - protein, 16 aa, Homo sapiens
  Duplicated TCRalpha strand read sequence and cancer-specific TCRalpha read sequence in cancer patients
CAVQVRGTSYGKLTFG

SEQ ID NO: 1773 - protein, 13 aa, Homo sapiens
  Duplicated TCRalpha strand read sequence and cancer-specific TCRalpha read sequence in cancer patients
CAVSGSARQLTFG

SEQ ID NO: 1774 - protein, 15 aa, Homo sapiens
  Duplicated TCRalpha strand read sequence and cancer-specific TCRalpha read sequence in cancer patients
CAVEGTGGSYIPTFG

SEQ ID NO: 1775 - protein, 11 aa, Homo sapiens
  Duplicated TCRalpha strand read sequence and cancer-specific TCRalpha read sequence in cancer patients
FPHGQESTYFW

SEQ ID NO: 1776 - protein, 15 aa, Homo sapiens
  Duplicated TCRalpha strand read sequence and cancer-specific TCRalpha read sequence in cancer patients
CAVDMDTGRRALTFG

SEQ ID NO: 1777 - protein, 15 aa, Homo sapiens
  Duplicated TCRalpha strand read sequence and cancer-specific TCRalpha read sequence in cancer patients
CAVGNTGTASKLTFG

SEQ ID NO: 1778 - protein, 12 aa, Homo sapiens
  Duplicated TCRalpha strand read sequence and cancer-specific TCRalpha read sequence in cancer patients
CAVEDNNDMRFG

SEQ ID NO: 1779 - protein, 15 aa, Homo sapiens
  Duplicated TCRalpha strand read sequence and cancer-specific TCRalpha read sequence in cancer patients
CAVDYGGSQGNLIFG

SEQ ID NO: 1780 - protein, 15 aa, Homo sapiens
  Duplicated TCRalpha strand read sequence and cancer-specific TCRalpha read sequence in cancer patients
CAVEWSSNTGKLIFG

SEQ ID NO: 1781 - protein, 13 aa, Homo sapiens
  Duplicated TCRalpha strand read sequence and cancer-specific TCRalpha read sequence in cancer patients
CAVPYNTDKLIFG

SEQ ID NO: 1782 - protein, 11 aa, Homo sapiens
  Duplicated TCRalpha strand read sequence and cancer-specific TCRalpha read sequence in cancer patients
CAVAVDKLIFG

SEQ ID NO: 1783 - protein, 15 aa, Homo sapiens
  Duplicated TCRalpha strand read sequence and cancer-specific TCRalpha read sequence in cancer patients
CAVKRGDSNYQLIWG

SEQ ID NO: 1784 - protein, 12 aa, Homo sapiens
  Duplicated TCRalpha strand read sequence and cancer-specific TCRalpha read sequence in cancer patients
CAVEDNYQLIWG

SEQ ID NO: 1785 - protein, 12 aa, Homo sapiens
  Duplicated TCRalpha strand read sequence and cancer-specific TCRalpha read sequence in cancer patients
CAVDSNYQLIWG

SEQ ID NO: 1786 - protein, 12 aa, Homo sapiens
  Duplicated TCRalpha strand read sequence and cancer-specific TCRalpha read sequence in cancer patients
CAVELNARLMFG

SEQ ID NO: 1787 - protein, 14 aa, Homo sapiens
  Duplicated TCRalpha strand read sequence and cancer-specific TCRalpha read sequence in cancer patients
CAVEDRRDDKIIFG

SEQ ID NO: 1788 - protein, 16 aa, Homo sapiens
  Duplicated TCRalpha strand read sequence and cancer-specific TCRalpha read sequence in cancer patients
CAVEDQNSSASKIIFG

SEQ ID NO: 1789 - protein, 14 aa, Homo sapiens
  Duplicated TCRalpha strand read sequence and cancer-specific TCRalpha read sequence in cancer patients
CAVALQQCFQDNLW

SEQ ID NO: 1790 - protein, 11 aa, Homo sapiens
  Duplicated TCRalpha strand read sequence and cancer-specific TCRalpha read sequence in cancer patients
CAANAGKSTFG

SEQ ID NO: 1791 - protein, 13 aa, Homo sapiens
  Duplicated TCRalpha strand read sequence and cancer-specific TCRalpha read sequence in cancer patients
CAVYNYGQNFVFG

SEQ ID NO: 1792 - protein, 15 aa, Homo sapiens
  Duplicated TCRalpha strand read sequence and cancer-specific TCRalpha read sequence in cancer patients
CAVEDRNYGQNFVFG

SEQ ID NO: 1793 - protein, 13 aa, Homo sapiens
  Duplicated TCRalpha strand read sequence and cancer-specific TCRalpha read sequence in cancer patients
CAVDNYGQNFVFG

SEQ ID NO: 1794 - protein, 13 aa, Homo sapiens
  Duplicated TCRalpha strand read sequence and cancer-specific TCRalpha read sequence in cancer patients
CAADNYGQNFVFG

SEQ ID NO: 1795 - protein, 13 aa, Homo sapiens
  Duplicated TCRalpha strand read sequence and cancer-specific TCRalpha read sequence in cancer patients
CAVESAARQLTFG

SEQ ID NO: 1796 - protein, 13 aa, Homo sapiens
  Duplicated TCRalpha strand read sequence and cancer-specific TCRalpha read sequence in cancer patients
CAVSSNDYKLSFG

SEQ ID NO: 1797 - protein, 14 aa, Homo sapiens
  Duplicated TCRalpha strand read sequence and cancer-specific TCRalpha read sequence in cancer patients
CAVPNQAGTALIFG

SEQ ID NO: 1798 - protein, 14 aa, Homo sapiens
  Duplicated TCRalpha strand read sequence and cancer-specific TCRalpha read sequence in cancer patients
CAVANQAGTALIFG

SEQ ID NO: 1799 - protein, 15 aa, Homo sapiens
  Duplicated TCRalpha strand read sequence and cancer-specific TCRalpha read sequence in cancer patients
CAVLNSGGYQKVTFG

SEQ ID NO: 1800 - protein, 14 aa, Homo sapiens
  Duplicated TCRalpha strand read sequence and cancer-specific TCRalpha read sequence in cancer patients
CALSEFSGYALNFG

SEQ ID NO: 1801 - protein, 14 aa, Homo sapiens
  Duplicated TCRalpha strand read sequence and cancer-specific TCRalpha read sequence in cancer patients
CATVSNRDDKIIFG

SEQ ID NO: 1802 - protein, 15 aa, Homo sapiens
  Duplicated TCRalpha strand read sequence and cancer-specific TCRalpha read sequence in cancer patients
CALATQGGSEKLVFG

SEQ ID NO: 1803 - protein, 14 aa, Homo sapiens
  Duplicated TCRalpha strand read sequence and cancer-specific TCRalpha read sequence in cancer patients
CALSLKYGNKLVFG

SEQ ID NO: 1804 - protein, 18 aa, Homo sapiens
  Duplicated TCRalpha strand read sequence and cancer-specific TCRalpha read sequence in cancer patients
CAMREPWNSGSARQLTFG

SEQ ID NO: 1805 - protein, 15 aa, Homo sapiens
  Duplicated TCRalpha strand read sequence and cancer-specific TCRalpha read sequence in cancer patients
CAENPTGGSYIPTFG

SEQ ID NO: 1806 - protein, 15 aa, Homo sapiens
  Duplicated TCRalpha strand read sequence and cancer-specific TCRalpha read sequence in cancer patients
CAESPTGANSKLTFG

SEQ ID NO: 1807 - protein, 15 aa, Homo sapiens
  Duplicated TCRalpha strand read sequence and cancer-specific TCRalpha read sequence in cancer patients
CAEPRRGGADGLTFG

SEQ ID NO: 1808 - protein, 13 aa, Homo sapiens
  Duplicated TCRalpha strand read sequence and cancer-specific TCRalpha read sequence in cancer patients
CAENNAGNMLTFG

SEQ ID NO: 1809 - protein, 14 aa, Homo sapiens
  Duplicated TCRalpha strand read sequence and cancer-specific TCRalpha read sequence in cancer patients
CAENIKNTDKLIFG

SEQ ID NO: 1810 - protein, 13 aa, Homo sapiens
  Duplicated TCRalpha strand read sequence and cancer-specific TCRalpha read sequence in cancer patients
CAERGGINKFYFG

SEQ ID NO: 1811 - protein, 13 aa, Homo sapiens
  Duplicated TCRalpha strand read sequence and cancer-specific TCRalpha read sequence in cancer patients
CAENQAGTALIFG

SEQ ID NO: 1812 - protein, 13 aa, Homo sapiens
  Duplicated TCRalpha strand read sequence and cancer-specific TCRalpha read sequence in cancer patients
CAASKGGFKTIFG

SEQ ID NO: 1813 - protein, 15 aa, Homo sapiens
  Duplicated TCRalpha strand read sequence and cancer-specific TCRalpha read sequence in cancer patients
CAAAGGTSYGKLTFG

SEQ ID NO: 1814 - protein, 13 aa, Homo sapiens
  Duplicated TCRalpha strand read sequence and cancer-specific TCRalpha read sequence in cancer patients
CAADTGRRALTFG

SEQ ID NO: 1815 - protein, 17 aa, Homo sapiens
  Duplicated TCRalpha strand read sequence and cancer-specific TCRalpha read sequence in cancer patients
CAASSYSGGGADGLTFG

SEQ ID NO: 1816 - protein, 16 aa, Homo sapiens
  Duplicated TCRalpha strand read sequence and cancer-specific TCRalpha read sequence in cancer patients
CAAPRVGGGADGLTFG

SEQ ID NO: 1817 - protein, 14 aa, Homo sapiens
  Duplicated TCRalpha strand read sequence and cancer-specific TCRalpha read sequence in cancer patients
CAASKRSNYQLIWG

SEQ ID NO: 1818 - protein, 14 aa, Homo sapiens
  Duplicated TCRalpha strand read sequence and cancer-specific TCRalpha read sequence in cancer patients
CAASKGSNYQLIWG

SEQ ID NO: 1819 - protein, 15 aa, Homo sapiens
  Duplicated TCRalpha strand read sequence and cancer-specific TCRalpha read sequence in cancer patients
CAASYGGATNKLIFG

SEQ ID NO: 1820 - protein, 14 aa, Homo sapiens
  Duplicated TCRalpha strand read sequence and cancer-specific TCRalpha read sequence in cancer patients
CAARGSSASKIIFG

SEQ ID NO: 1821 - protein, 14 aa, Homo sapiens
  Duplicated TCRalpha strand read sequence and cancer-specific TCRalpha read sequence in cancer patients
CAATYRNAGKSTFG

SEQ ID NO: 1822 - protein, 15 aa, Homo sapiens
  Duplicated TCRalpha strand read sequence and cancer-specific TCRalpha read sequence in cancer patients
CAASLYNQGGKLIFG

SEQ ID NO: 1823 - protein, 14 aa, Homo sapiens
  Duplicated TCRalpha strand read sequence and cancer-specific TCRalpha read sequence in cancer patients
CAASRGNFNKFYFG

SEQ ID NO: 1824 - protein, 13 aa, Homo sapiens
  Duplicated TCRalpha strand read sequence and cancer-specific TCRalpha read sequence in cancer patients
CAAQKGDYKLSFG

SEQ ID NO: 1825 - protein, 14 aa, Homo sapiens
  Duplicated TCRalpha strand read sequence and cancer-specific TCRalpha read sequence in cancer patients
CAASNQAGTALIFG

SEQ ID NO: 1826 - protein, 13 aa, Homo sapiens
  Duplicated TCRalpha strand read sequence and cancer-specific TCRalpha read sequence in cancer patients
CAANQAGTALIFG

SEQ ID NO: 1827 - protein, 13 aa, Homo sapiens
  Duplicated TCRalpha strand read sequence and cancer-specific TCRalpha read sequence in cancer patients
CAATREEETNSPL

SEQ ID NO: 1828 - protein, 15 aa, Homo sapiens
  Duplicated TCRalpha strand read sequence and cancer-specific TCRalpha read sequence in cancer patients
CAMSASSNTGKLIFG

SEQ ID NO: 1829 - protein, 12 aa, Homo sapiens
  Duplicated TCRalpha strand read sequence and cancer-specific TCRalpha read sequence in cancer patients
CAMNNNARLMFG

SEQ ID NO: 1830 - protein, 15 aa, Homo sapiens
  Duplicated TCRalpha strand read sequence and cancer-specific TCRalpha read sequence in cancer patients
CAMRGIRDAGKSTFG

SEQ ID NO: 1831 - protein, 15 aa, Homo sapiens
  Duplicated TCRalpha strand read sequence and cancer-specific TCRalpha read sequence in cancer patients
CAMSAYNQGGKLIFG

SEQ ID NO: 1832 - protein, 16 aa, Homo sapiens
  Duplicated TCRalpha strand read sequence and cancer-specific TCRalpha read sequence in cancer patients
CAMSEGRHNFNKFTLD

SEQ ID NO: 1833 - protein, 12 aa, Homo sapiens
  Duplicated TCRalpha strand read sequence and cancer-specific TCRalpha read sequence in cancer patients
CAMTGYSTLTFG

SEQ ID NO: 1834 - protein, 13 aa, Homo sapiens
  Duplicated TCRalpha strand read sequence and cancer-specific TCRalpha read sequence in cancer patients
CAVYRRKLHTYIW

SEQ ID NO: 1835 - protein, 13 aa, Homo sapiens
  Duplicated TCRalpha strand read sequence and cancer-specific TCRalpha read sequence in cancer patients
CAVYSSASKIIFG

SEQ ID NO: 1836 - protein, 13 aa, Homo sapiens
  Duplicated TCRalpha strand read sequence and cancer-specific TCRalpha read sequence in cancer patients
CGLNTGGFKTIFG

SEQ ID NO: 1837 - protein, 14 aa, Homo sapiens
  Duplicated TCRalpha strand read sequence and cancer-specific TCRalpha read sequence in cancer patients
CVVNEGGSYIPTFG

SEQ ID NO: 1838 - protein, 17 aa, Homo sapiens
  Duplicated TCRalpha strand read sequence and cancer-specific TCRalpha read sequence in cancer patients
CVVPLLMDTGRRALTFG

SEQ ID NO: 1839 - protein, 15 aa, Homo sapiens
  Duplicated TCRalpha strand read sequence and cancer-specific TCRalpha read sequence in cancer patients
CVVNMDTGRRALTFG

SEQ ID NO: 1840 - protein, 15 aa, Homo sapiens
  Duplicated TCRalpha strand read sequence and cancer-specific TCRalpha read sequence in cancer patients
CVLKPRGSQGNLIFG

SEQ ID NO: 1841 - protein, 14 aa, Homo sapiens
  Duplicated TCRalpha strand read sequence and cancer-specific TCRalpha read sequence in cancer patients
CVVNSPGANNLFFG

SEQ ID NO: 1842 - protein, 13 aa, Homo sapiens
  Duplicated TCRalpha strand read sequence and cancer-specific TCRalpha read sequence in cancer patients
CVVNDYGQNFVFG

SEQ ID NO: 1843 - protein, 11 aa, Homo sapiens
  Duplicated TCRalpha strand read sequence and cancer-specific TCRalpha read sequence in cancer patients
CAVNDYKLSFG

SEQ ID NO: 1844 - protein, 14 aa, Homo sapiens
  Duplicated TCRalpha strand read sequence and cancer-specific TCRalpha read sequence in cancer patients
CAVRDSSNYQLIWG

SEQ ID NO: 1845 - protein, 13 aa, Homo sapiens
  Duplicated TCRalpha strand read sequence and cancer-specific TCRalpha read sequence in cancer patients
CAVRDGNYQLIWG

SEQ ID NO: 1846 - protein, 13 aa, Homo sapiens
  Duplicated TCRalpha strand read sequence and cancer-specific TCRalpha read sequence in cancer patients
CAVMDSNYQLIWA

SEQ ID NO: 1847 - protein, 13 aa, Homo sapiens
  Duplicated TCRalpha strand read sequence and cancer-specific TCRalpha read sequence in cancer patients
CAVLDSNYQLIWA

SEQ ID NO: 1848 - protein, 13 aa, Homo sapiens
  Duplicated TCRalpha strand read sequence and cancer-specific TCRalpha read sequence in cancer patients
CATMDSNYQLIWG

SEQ ID NO: 1849 - protein, 16 aa, Homo sapiens
  Duplicated TCRalpha strand read sequence and cancer-specific TCRalpha read sequence in cancer patients
CAVRDHGGATNKLIFG

SEQ ID NO: 1850 - protein, 14 aa, Homo sapiens
  Duplicated TCRalpha strand read sequence and cancer-specific TCRalpha read sequence in cancer patients
CAVRGQAGTALIFG

SEQ ID NO: 1851 - protein, 13 aa, Homo sapiens
  Duplicated TCRalpha strand read sequence and cancer-specific TCRalpha read sequence in cancer patients
CASLDSSYKLIFG

SEQ ID NO: 1852 - protein, 13 aa, Homo sapiens
  Duplicated TCRalpha strand read sequence and cancer-specific TCRalpha read sequence in cancer patients
CAVRDSNYQLIWG

SEQ ID NO: 1853 - protein, 16 aa, Homo sapiens
  Duplicated TCRalpha strand read sequence and cancer-specific TCRalpha read sequence in cancer patients
CAVRDSRRGNTPLVFG

SEQ ID NO: 1854 - protein, 16 aa, Homo sapiens
  Duplicated TCRalpha strand read sequence and cancer-specific TCRalpha read sequence in cancer patients
CAVREPNTNAGKSTFG

SEQ ID NO: 1855 - protein, 13 aa, Homo sapiens
  Duplicated TCRalpha strand read sequence and cancer-specific TCRalpha read sequence in cancer patients
CAVKAAGNKLTFG

SEQ ID NO: 1856 - protein, 17 aa, Homo sapiens
  Duplicated TCRalpha strand read sequence and cancer-specific TCRalpha read sequence in cancer patients
CVVTLTMNTGFQKLVFG

SEQ ID NO: 1857 - protein, 14 aa, Homo sapiens
  Duplicated TCRalpha strand read sequence and cancer-specific TCRalpha read sequence in cancer patients
CVVPTSGTYKYIFG

SEQ ID NO: 1858 - protein, 17 aa, Homo sapiens
  Duplicated TCRalpha strand read sequence and cancer-specific TCRalpha read sequence in cancer patients
CVVTPSRAGGYNKLILE

SEQ ID NO: 1859 - protein, 16 aa, Homo sapiens
  Duplicated TCRalpha strand read sequence and cancer-specific TCRalpha read sequence in cancer patients
CVVSAESGGYNKLILE

SEQ ID NO: 1860 - protein, 16 aa, Homo sapiens
  Duplicated TCRalpha strand read sequence and cancer-specific TCRalpha read sequence in cancer patients
CVVSAESGGYNKLIFG

SEQ ID NO: 1861 - protein, 15 aa, Homo sapiens
  Duplicated TCRbeta strand read sequence and cancer-specific TCRbeta read sequence in cancer patients
CSAREPGGGREQFFG

SEQ ID NO: 1862 - protein, 15 aa, Homo sapiens
  Duplicated TCRbeta strand read sequence and cancer-specific TCRbeta read sequence in cancer patients
CASSLAGGPYEQYFG

SEQ ID NO: 1863 - protein, 16 aa, Homo sapiens
  Duplicated TCRbeta strand read sequence and cancer-specific TCRbeta read sequence in cancer patients
CASSVDGDSYNEQFFG

SEQ ID NO: 1864 - protein, 12 aa, Homo sapiens
  Duplicated TCRbeta strand read sequence and cancer-specific TCRbeta read sequence in cancer patients
CASSSTDTQYFG

SEQ ID NO: 1865 - protein, 15 aa, Homo sapiens
  Duplicated TCRbeta strand read sequence and cancer-specific TCRbeta read sequence in cancer patients
CASSLSGDNSPLHFG

SEQ ID NO: 1866 - protein, 12 aa, Homo sapiens
  Duplicated TCRbeta strand read sequence and cancer-specific TCRbeta read sequence in cancer patients
CASSSGNTIYFG

SEQ ID NO: 1867 - protein, 12 aa, Homo sapiens
  Duplicated TCRbeta strand read sequence and cancer-specific TCRbeta read sequence in cancer patients
CASSPRGELFFG

SEQ ID NO: 1868 - protein, 18 aa, Homo sapiens
  Duplicated TCRbeta strand read sequence and cancer-specific TCRbeta read sequence in cancer patients
CASSRMGQGVGGNTIYFG

SEQ ID NO: 1869 - protein, 17 aa, Homo sapiens
  Duplicated TCRbeta strand read sequence and cancer-specific TCRbeta read sequence in cancer patients
CASSQRTSGITNEQFFG

SEQ ID NO: 1870 - protein, 14 aa, Homo sapiens
  Duplicated TCRbeta strand read sequence and cancer-specific TCRbeta read sequence in cancer patients
CASSLIGAGELFFW

SEQ ID NO: 1871 - protein, 13 aa, Homo sapiens
  Duplicated TCRbeta strand read sequence and cancer-specific TCRbeta read sequence in cancer patients
CASSTSSDTQYFW

SEQ ID NO: 1872 - protein, 16 aa, Homo sapiens
  Duplicated TCRbeta strand read sequence and cancer-specific TCRbeta read sequence in cancer patients
CASSYGMGVNTEAFFG

SEQ ID NO: 1873 - protein, 13 aa, Homo sapiens
  Duplicated TCRbeta strand read sequence and cancer-specific TCRbeta read sequence in cancer patients
CASSIQGYEQYFG

SEQ ID NO: 1874 - protein, 14 aa, Homo sapiens
  Duplicated TCRbeta strand read sequence and cancer-specific TCRbeta read sequence in cancer patients
CASGWASTDTQYFG

SEQ ID NO: 1875 - protein, 15 aa, Homo sapiens
  Duplicated TCRbeta strand read sequence and cancer-specific TCRbeta read sequence in cancer patients
CASSYGASSYEQYFG

SEQ ID NO: 1876 - protein, 15 aa, Homo sapiens
  Duplicated TCRbeta strand read sequence and cancer-specific TCRbeta read sequence in cancer patients
CASSYTAKKETQYFG

SEQ ID NO: 1877 - protein, 15 aa, Homo sapiens
  Duplicated TCRbeta strand read sequence and cancer-specific TCRbeta read sequence in cancer patients
CASSASLAGYEQYFG

SEQ ID NO: 1878 - protein, 16 aa, Homo sapiens
  Duplicated TCRbeta strand read sequence and cancer-specific TCRbeta read sequence in cancer patients
CASSHNTGTGNEQFFG

SEQ ID NO: 1879 - protein, 16 aa, Homo sapiens
  Duplicated TCRbeta strand read sequence and cancer-specific TCRbeta read sequence in cancer patients
CASSQDRSRVYGYTFG

SEQ ID NO: 1880 - protein, 13 aa, Homo sapiens
  Duplicated TCRbeta strand read sequence and cancer-specific TCRbeta read sequence in cancer patients
CASSQDVYGYTFG

SEQ ID NO: 1881 - protein, 15 aa, Homo sapiens
  Duplicated TCRbeta strand read sequence and cancer-specific TCRbeta read sequence in cancer patients
CASSQDLGVLRAVLR

SEQ ID NO: 1882 - protein, 15 aa, Homo sapiens
  Duplicated TCRbeta strand read sequence and cancer-specific TCRbeta read sequence in cancer patients
CASSLAQDYNEQFFG

SEQ ID NO: 1883 - protein, 14 aa, Homo sapiens
  Duplicated TCRbeta strand read sequence and cancer-specific TCRbeta read sequence in cancer patients
CASSQAPGQGAHFG

SEQ ID NO: 1884 - protein, 14 aa, Homo sapiens
  Duplicated TCRbeta strand read sequence and cancer-specific TCRbeta read sequence in cancer patients
CSVAAGVNYEQYFG

SEQ ID NO: 1885 - protein, 17 aa, Homo sapiens
  Duplicated TCRbeta strand read sequence and cancer-specific TCRbeta read sequence in cancer patients
CSVRPGTSGRGNEQFFG

SEQ ID NO: 1886 - protein, 15 aa, Homo sapiens
  Duplicated TCRbeta strand read sequence and cancer-specific TCRbeta read sequence in cancer patients
CSVLREITYNEQFFG

SEQ ID NO: 1887 - protein, 13 aa, Homo sapiens
  Duplicated TCRbeta strand read sequence and cancer-specific TCRbeta read sequence in cancer patients
CSVEPGAREQFFG

SEQ ID NO: 1888 - protein, 12 aa, Homo sapiens
  Duplicated TCRbeta strand read sequence and cancer-specific TCRbeta read sequence in cancer patients
CSVDLYNEQFFG

SEQ ID NO: 1889 - protein, 15 aa, Homo sapiens
  Duplicated TCRbeta strand read sequence and cancer-specific TCRbeta read sequence in cancer patients
CSAMLTGGGNEQFFG

SEQ ID NO: 1890 - protein, 11 aa, Homo sapiens
  Duplicated TCRbeta strand read sequence and cancer-specific TCRbeta read sequence in cancer patients
CASGQETQYFG

SEQ ID NO: 1891 - protein, 20 aa, Homo sapiens
  Duplicated TCRbeta strand read sequence and cancer-specific TCRbeta read sequence in cancer patients
CATSDLSGGSRSSYNEQFFG

SEQ ID NO: 1892 - protein, 13 aa, Homo sapiens
  Duplicated TCRbeta strand read sequence and cancer-specific TCRbeta read sequence in cancer patients
CSAPGGNLRAVLR

SEQ ID NO: 1893 - protein, 17 aa, Homo sapiens
  Duplicated TCRbeta strand read sequence and cancer-specific TCRbeta read sequence in cancer patients
CSAWDFTNSGANVLTFG

SEQ ID NO: 1894 - protein, 14 aa, Homo sapiens
  Duplicated TCRbeta strand read sequence and cancer-specific TCRbeta read sequence in cancer patients
CSARGRWAETQYFG

SEQ ID NO: 1895 - protein, 13 aa, Homo sapiens
  Duplicated TCRbeta strand read sequence and cancer-specific TCRbeta read sequence in cancer patients
CSAKQASETQYFG

SEQ ID NO: 1896 - protein, 16 aa, Homo sapiens
  Duplicated TCRbeta strand read sequence and cancer-specific TCRbeta read sequence in cancer patients
CSARDWRGAKNIQYFG

SEQ ID NO: 1897 - protein, 15 aa, Homo sapiens
  Duplicated TCRbeta strand read sequence and cancer-specific TCRbeta read sequence in cancer patients
CASSMIREYNEQFFG

SEQ ID NO: 1898 - protein, 15 aa, Homo sapiens
  Duplicated TCRbeta strand read sequence and cancer-specific TCRbeta read sequence in cancer patients
CASSITSASYEQFFG

SEQ ID NO: 1899 - protein, 16 aa, Homo sapiens
  Duplicated TCRbeta strand read sequence and cancer-specific TCRbeta read sequence in cancer patients
CASSILGNGNQPQHFG

SEQ ID NO: 1900 - protein, 15 aa, Homo sapiens
  Duplicated TCRbeta strand read sequence and cancer-specific TCRbeta read sequence in cancer patients
CASSIERGIYGYTFG

SEQ ID NO: 1901 - protein, 14 aa, Homo sapiens
  Duplicated TCRbeta strand read sequence and cancer-specific TCRbeta read sequence in cancer patients
CASSPLNEYEQYFG

SEQ ID NO: 1902 - protein, 15 aa, Homo sapiens
  Duplicated TCRbeta strand read sequence and cancer-specific TCRbeta read sequence in cancer patients
CASSMGTGTYEQYFG

SEQ ID NO: 1903 - protein, 15 aa, Homo sapiens
  Duplicated TCRbeta strand read sequence and cancer-specific TCRbeta read sequence in cancer patients
CASSFSAPKPTPLSL

SEQ ID NO: 1904 - protein, 14 aa, Homo sapiens
  Duplicated TCRbeta strand read sequence and cancer-specific TCRbeta read sequence in cancer patients
CASSLRANTEAFFG

SEQ ID NO: 1905 - protein, 13 aa, Homo sapiens
  Duplicated TCRbeta strand read sequence and cancer-specific TCRbeta read sequence in cancer patients
CASSSAGDTQYFW

SEQ ID NO: 1906 - protein, 15 aa, Homo sapiens
  Duplicated TCRbeta strand read sequence and cancer-specific TCRbeta read sequence in cancer patients
CASSRRQGAYEQYFG

SEQ ID NO: 1907 - protein, 13 aa, Homo sapiens
  Duplicated TCRbeta strand read sequence and cancer-specific TCRbeta read sequence in cancer patients
CASSLPGYGYTFG

SEQ ID NO: 1908 - protein, 19 aa, Homo sapiens
  Duplicated TCRbeta strand read sequence and cancer-specific TCRbeta read sequence in cancer patients
CAISERRIAGTSTDTQYFG

SEQ ID NO: 1909 - protein, 15 aa, Homo sapiens
  Duplicated TCRbeta strand read sequence and cancer-specific TCRbeta read sequence in cancer patients
CAISEFAGPEGYTFG

SEQ ID NO: 1910 - DNA, 85 bp, artificial sequence
  P5-P20EA primer sequence
aatgatacggcgaccaccgagatctacacatcacgactctttccctacacgacgctcttccgatcttaatacgactccgaattcc

SEQ ID NO: 1911 - DNA, 85 bp, artificial sequence
  P5-P20EA primer sequence
aatgatacggcgaccaccgagatctacacacagtggttctttccctacacgacgctcttccgatcttaatacgactccgaattcc

SEQ ID NO: 1912 - DNA, 85 bp, artificial sequence
  P5-P20EA primer sequence
aatgatacggcgaccaccgagatctacaccagatccatctttccctacacgacgctcttccgatcttaatacgactccgaattcc

SEQ ID NO: 1913 - DNA, 85 bp, artificial sequence
  P5-P20EA primer sequence
aatgatacggcgaccaccgagatctacacacaaacggtctttccctacacgacgctcttccgatcttaatacgactccgaattcc

SEQ ID NO: 1914 - DNA, 85 bp, artificial sequence
  P5-P20EA primer sequence
aatgatacggcgaccaccgagatctacacacccagcatctttccctacacgacgctcttccgatcttaatacgactccgaattcc

SEQ ID NO: 1915 - DNA, 85 bp, artificial sequence
  P5-P20EA primer sequence
aatgatacggcgaccaccgagatctacacaacccctctctttccctacacgacgctcttccgatcttaatacgactccgaattcc

SEQ ID NO: 1916 - DNA, 85 bp, artificial sequence
  P5-P20EA primer sequence
aatgatacggcgaccaccgagatctacaccccaaccttctttccctacacgacgctcttccgatcttaatacgactccgaattcc

SEQ ID NO: 1917 - DNA, 85 bp, artificial sequence
  P5-P20EA primer sequence
aatgatacggcgaccaccgagatctacaccaccacactctttccctacacgacgctcttccgatcttaatacgactccgaattcc

SEQ ID NO: 1918 - DNA, 85 bp, artificial sequence
  P5-P20EA primer sequence
aatgatacggcgaccaccgagatctacacgaaacccatctttccctacacgacgctcttccgatcttaatacgactccgaattcc

SEQ ID NO: 1919 - DNA, 85 bp, artificial sequence
  P5-P20EA primer sequence
aatgatacggcgaccaccgagatctacactgtgaccatctttccctacacgacgctcttccgatcttaatacgactccgaattcc

SEQ ID NO: 1920 - DNA, 85 bp, artificial sequence
  P5-P20EA primer sequence
aatgatacggcgaccaccgagatctacacagggtcaatctttccctacacgacgctcttccgatcttaatacgactccgaattcc

SEQ ID NO: 1921 - DNA, 85 bp, artificial sequence
  P5-P20EA primer sequence
aatgatacggcgaccaccgagatctacacaggagtggtctttccctacacgacgctcttccgatcttaatacgactccgaattcc

SEQ ID NO: 1922 - DNA, 89 bp, artificial sequence
  P7-CA3 primer sequence
caagcagaagacggcatacgagattgaaccttgtgactggagttcagacgtgtgctcttccgatctataggcagacagacttgtcactg

SEQ ID NO: 1923 - DNA, 89 bp, artificial sequence
  P7-CA3 primer sequence
caagcagaagacggcatacgagattgctaagtgtgactggagttcagacgtgtgctcttccgatctataggcagacagacttgtcactg

SEQ ID NO: 1924 - DNA, 89 bp, artificial sequence
  P7-CA3 primer sequence
caagcagaagacggcatacgagattgttctctgtgactggagttcagacgtgtgctcttccgatctataggcagacagacttgtcactg

SEQ ID NO: 1925 - DNA, 89 bp, artificial sequence
  P7-CA3 primer sequence
caagcagaagacggcatacgagattaagacacgtgactggagttcagacgtgtgctcttccgatctataggcagacagacttgtcactg

SEQ ID NO: 1926 - DNA, 89 bp, artificial sequence
  P7-CA3 primer sequence
caagcagaagacggcatacgagatctaatcgagtgactggagttcagacgtgtgctcttccgatctataggcagacagacttgtcactg

SEQ ID NO: 1927 - DNA, 89 bp, artificial sequence
  P7-CA3 primer sequence
caagcagaagacggcatacgagatctagaacagtgactggagttcagacgtgtgctcttccgatctataggcagacagacttgtcactg

SEQ ID NO: 1928 - DNA, 89 bp, artificial sequence
  P7-CA3 primer sequence
caagcagaagacggcatacgagattaagttccgtgactggagttcagacgtgtgctcttccgatctataggcagacagacttgtcactg

SEQ ID NO: 1929 - DNA, 89 bp, artificial sequence
  P7-CA3 primer sequence
caagcagaagacggcatacgagattagacctagtgactggagttcagacgtgtgctcttccgatctataggcagacagacttgtcactg

SEQ ID NO: 1930 - DNA, 89 bp, artificial sequence
  P7-CB3 primer sequence
caagcagaagacggcatacgagattgaaccttgtgactggagttcagacgtgtgctcttccgatctacaccagtgtggccttttgggtg

SEQ ID NO: 1931 - DNA, 89 bp, artificial sequence
  P7-CB3 primer sequence
caagcagaagacggcatacgagattgctaagtgtgactggagttcagacgtgtgctcttccgatctacaccagtgtggccttttgggtg

SEQ ID NO: 1932 - DNA, 89 bp, artificial sequence
  P7-CB3 primer sequence
caagcagaagacggcatacgagattgttctctgtgactggagttcagacgtgtgctcttccgatctacaccagtgtggccttttgggtg

SEQ ID NO: 1933 - DNA, 89 bp, artificial sequence
  P7-CB3 primer sequence
caagcagaagacggcatacgagattaagacacgtgactggagttcagacgtgtgctcttccgatctacaccagtgtggccttttgggtg

SEQ ID NO: 1934 - DNA, 89 bp, artificial sequence
  P7-CB3 primer sequence
caagcagaagacggcatacgagatctaatcgagtgactggagttcagacgtgtgctcttccgatctacaccagtgtggccttttgggtg

SEQ ID NO: 1935 - DNA, 89 bp, artificial sequence
  P7-CB3 primer sequence
caagcagaagacggcatacgagatctagaacagtgactggagttcagacgtgtgctcttccgatctacaccagtgtggccttttgggtg

SEQ ID NO: 1936 - DNA, 89 bp, artificial sequence
  P7-CB3 primer sequence
caagcagaagacggcatacgagattaagttccgtgactggagttcagacgtgtgctcttccgatctacaccagtgtggccttttgggtg

SEQ ID NO: 1937 - DNA, 89 bp, artificial sequence
  P7-CB3 primer sequence
caagcagaagacggcatacgagattagacctagtgactggagttcagacgtgtgctcttccgatctacaccagtgtggccttttgggtg

SEQ ID NO: 1938 - protein, 12 aa, Homo sapiens
  Invariant TCRs observed in public TRA sequences
CAVRDSNYQLIW

SEQ ID NO: 1939 - protein, 12 aa, Homo sapiens
  Invariant TCRs observed in public TRA sequences
CAVRDSNYQLIW

SEQ ID NO: 1940 - protein, 12 aa, Homo sapiens
  Invariant TCRs observed in public TRA sequences
CAVLDSNYQLIW

SEQ ID NO: 1941 - protein, 12 aa, Homo sapiens
  Invariant TCRs observed in public TRA sequences
CAVMDSSYKLIF

SEQ ID NO: 1942 - protein, 12 aa, Homo sapiens
  Invariant TCRs observed in public TRA sequences
CAVTDSNYQLIW

SEQ ID NO: 1943 - protein, 12 aa, Homo sapiens
  Invariant TCRs observed in public TRA sequences
CAVRDGDYKLSF

SEQ ID NO: 1944 - protein, 12 aa, Homo sapiens
  Invariant TCRs observed in public TRA sequences
CAVKDSNYQLIW

SEQ ID NO: 1945 - protein, 12 aa, Homo sapiens
  Invariant TCRs observed in public TRA sequences
CAAMDSNYQLIW

SEQ ID NO: 1946 - protein, 12 aa, Homo sapiens
  Invariant TCRs observed in public TRA sequences
CAALDSNYQLIW

SEQ ID NO: 1947 - protein, 10 aa, Homo sapiens
  Invariant TCRs observed in public TRA sequences
CALNDYKLSF

SEQ ID NO: 1948 - protein, 12 aa, Homo sapiens
  Invariant TCRs observed in public TRA sequences
CAVVDSNYQLIW

SEQ ID NO: 1949 - protein, 15 aa, Homo sapiens
  Invariant TCRs observed in public TRA sequences
CVVSDRGSTLGRLYF

SEQ ID NO: 1950 - protein, 12 aa, Homo sapiens
  Invariant TCRs observed in public TRA sequences
CAVIDSNYQLIW

SEQ ID NO: 1951 - protein, 12 aa, Homo sapiens
  Invariant TCRs observed in public TRA sequences
CAENTGGFKTIF

SEQ ID NO: 1952 - protein, 12 aa, Homo sapiens
  Invariant TCRs observed in public TRA sequences
CAVSDSNYQLIW

SEQ ID NO: 1953 - protein, 13 aa, Homo sapiens
  Invariant TCRs observed in public TRA sequences
CALSGGSNYKLTF

SEQ ID NO: 1954 - protein, 14 aa, Homo sapiens
  Invariant TCRs observed in public TRA sequences
CAVEDQTGANNLFF

SEQ ID NO: 1955 - protein, 15 aa, Homo sapiens
  Invariant TCRs observed in public TRA sequences
CALSDSGGGADGLTF

SEQ ID NO: 1956 - protein, 12 aa, Homo sapiens
  Invariant TCRs observed in public TRA sequences
CAVRDRDYKLSF

SEQ ID NO: 1957 - protein, 12 aa, Homo sapiens
  Invariant TCRs observed in public TRA sequences
CAVRDRDYKLSF

SEQ ID NO: 1958 - protein, 10 aa, Homo sapiens
  Invariant TCRs observed in public TRA sequences
CAVNDYKLSF

SEQ ID NO: 1959 - protein, 12 aa, Homo sapiens
  Invariant TCRs observed in public TRA sequences
CAPMDSNYQLIW

SEQ ID NO: 1960 - protein, 12 aa, Homo sapiens
  Invariant TCRs observed in public TRA sequences
CASMDSNYQLIW

SEQ ID NO: 1961 - protein, 11 aa, Homo sapiens
  Invariant TCRs observed in public TRA sequences
CAVNRDDKIIF

SEQ ID NO: 1962 - protein, 14 aa, Homo sapiens
  Invariant TCRs observed in public TRA sequences
CAENSGGSNYKLTF

SEQ ID NO: 1963 - protein, 12 aa, Homo sapiens
  Invariant TCRs observed in public TRA sequences
CAPLDSNYQLIW

SEQ ID NO: 1964 - protein, 14 aa, Homo sapiens
  Invariant TCRs observed in public TRA sequences
CALNSGGSNYKLTF

SEQ ID NO: 1965 - protein, 10 aa, Homo sapiens
  Invariant TCRs observed in public TRA sequences
CVVNDYKLSF

SEQ ID NO: 1966 - protein, 12 aa, Homo sapiens
  Invariant TCRs observed in public TRA sequences
CALSSNDYKLSF

SEQ ID NO: 1967 - protein, 13 aa, Homo sapiens
  Invariant TCRs observed in public TRA sequences
CAASNQAGTALIF

SEQ ID NO: 1968 - protein, 11 aa, Homo sapiens
  Invariant TCRs observed in public TRA sequences
CVVNTGNQFYF

SEQ ID NO: 1969 - protein, 12 aa, Homo sapiens
  Invariant TCRs observed in public TRA sequences
CVVNTNAGKSTF

SEQ ID NO: 1970 - protein, 13 aa, Homo sapiens
  Invariant TCRs observed in public TRA sequences
CAVEDTGGFKTIF

SEQ ID NO: 1971 - protein, 12 aa, Homo sapiens
  Invariant TCRs observed in public TRA sequences
CAVEDSNYQLIW

SEQ ID NO: 1972 - protein, 12 aa, Homo sapiens
  Invariant TCRs observed in public TRA sequences
CAVDNYGQNFVF

SEQ ID NO: 1973 - protein, 15 aa, Homo sapiens
  Invariant TCRs observed in public TRA sequences
CALSDSGGSNYKLTF

SEQ ID NO: 1974 - protein, 12 aa, Homo sapiens
  Invariant TCRs observed in public TRA sequences
CAVMDSSYKLIF

SEQ ID NO: 1975 - protein, 12 aa, Homo sapiens
  Invariant TCRs observed in public TRA sequences
CAVNTGGFKTIF

SEQ ID NO: 1976 - protein, 12 aa, Homo sapiens
  Invariant TCRs observed in public TRA sequences
CAVRDGNYQLIW

SEQ ID NO: 1977 - protein, 12 aa, Homo sapiens
  Invariant TCRs observed in public TRA sequences
CALNTGFQKLVF

SEQ ID NO: 1978 - protein, 13 aa, Homo sapiens
  Invariant TCRs observed in public TRA sequences
CAENTGTASKLTF

SEQ ID NO: 1979 - protein, 12 aa, Homo sapiens
  Invariant TCRs observed in public TRA sequences
CAATDSNYQLIW

SEQ ID NO: 1980 - protein, 12 aa, Homo sapiens
  Invariant TCRs observed in public TRA sequences
CAVNQAGTALIF

SEQ ID NO: 1981 - protein, 14 aa, Homo sapiens
  Invariant TCRs observed in public TRA sequences
CAENYGGSQGNLIF

SEQ ID NO: 1982 - protein, 12 aa, Homo sapiens
  Invariant TCRs observed in public TRA sequences
CAVLNRDDKIIF

SEQ ID NO: 1983 - protein, 13 aa, Homo sapiens
  Invariant TCRs observed in public TRA sequences
CAVEDNYGQNFVF

SEQ ID NO: 1984 - protein, 10 aa, Homo sapiens
  Invariant TCRs observed in public TRA sequences
CAVNDYKLSF

SEQ ID NO: 1985 - protein, 10 aa, Homo sapiens
  Invariant TCRs observed in public TRA sequences
CVVNNARLMF

SEQ ID NO: 1986 - protein, 12 aa, Homo sapiens
  Invariant TCRs observed in public TRA sequences
CAVDNYGQNFVF

SEQ ID NO: 1987 - protein, 12 aa, Homo sapiens
  Invariant TCRs observed in public TRA sequences
CAVDSSASKIIF

SEQ ID NO: 1988 - protein, 13 aa, Homo sapiens
  Invariant TCRs observed in public TRA sequences
CALIYNQGGKLIF

SEQ ID NO: 1989 - protein, 12 aa, Homo sapiens
  Invariant TCRs observed in public TRA sequences
CALNTGGFKTIF

SEQ ID NO: 1990 - protein, 12 aa, Homo sapiens
  Invariant TCRs observed in public TRA sequences
CALNTGGFKTIF

SEQ ID NO: 1991 - protein, 12 aa, Homo sapiens
  Invariant TCRs observed in public TRA sequences
CAVLDSSYKLIF

SEQ ID NO: 1992 - protein, 12 aa, Homo sapiens
  Invariant TCRs observed in public TRA sequences
CAAMDSSYKLIF

SEQ ID NO: 1993 - DNA, 20 bp, Artificial Sequence
  Forward primer
gggaggacctcaggggtggc

SEQ ID NO: 1994 - DNA, 20 bp, Artificial Sequence
  Reverse  primer
tggtgggggtggggtcttgg

SEQ ID NO: 1995 - DNA, 17 bp, Artificial Sequence
  Forward primer
agcctcgcctttgccga

SEQ ID NO: 1996 - DNA, 15 bp, Artificial Sequence
  Reverse primer
ctggtgcctggggcg
